(19) United States
(12) Patent Application Publication
(10) Pub. No.: US 2011/0111458 A1
(43) Pub. Date: May 12, 2011

(54) INDUSTRIALLY USEFUL MICROORGANISM

(75) Inventors: Kimie Masuda, Tokyo (JP); Noriko Nakamura, Tokyo (JP); Hiroshi Mizoguchi, Tokyo (JP); Hideo Mori, Tokyo (JP)

(73) Assignee: KYOWA HAKKO KIRIN CO., LTD., Chiyoda-ku, Tokyo (JP)

(21) Appl. No.: 12/933,022

(22) PCT Filed: Mar. 18, 2009
(86) PCT No.: PCT/JP2009/055267

§ 371 Date: Sep. 16, 2010

(30) Foreign Application Priority Data
Mar. 18, 2008 (JP) 068793/2008

(51) Int. Cl. C12P 21/02; C12N 1/21; C12P 1/04; C12P 19/34; C12P 19/00; C12P 13/00

(52) U.S. Cl. 435/69.1; 435/252.33; 435/170; 435/91.1; 435/72; 435/128

(57) ABSTRACT

An object of the present invention is to provide an E. coli mutant strain having a chromosomal DNA not less than 1040 kbp shorter than that of a wild-type Escherichia coli, and a production method of a useful substance using the variant.

### TECHNICAL FIELD

[0001] The present invention relates to an E. coli mutant strain having chromosomal DNA shorter than that of a wild-type E. coli strain and a process for producing a useful substance using such mutant strain.

### BACKGROUND ART

[0002] All nucleotide sequences of the chromosomal DNAs of E. coli have been elucidated (Non-Patent Documents 1 and 2). Also, a method wherein a given gene or a given region on chromosomal DNA of E. coli is deleted by homologous recombination has been known (Non-Patent Document 3).

[0003] As reduced-genome strains defective in plural regions on the chromosome, MDS43 strain defective in 708 kbp (non-patent document 4), Δ16 strain defective in 1377 kbp (non-patent document 5) and Step28 strain defective in 1027 kbp (patent document 1) are already known.

[0004] MDS43 strains are known to grow equivalently to wild-type Escherichia coli strain MG1655, which is a parental strain, in a minimal medium or LB medium. In addition, Step28 strain shows an increased bacterial cell amount on termination of culture as compared to parental strain W3110red strain free of defective region on the chromosome, and is known to have a high ATP regeneration activity. Moreover, threonine production using Step28T strain, wherein threonine biosynthetic gene is reinforced, shows improved threonine productivity as compared to the use of W3110red strain.

[0005] However, Δ16 strain is known to show low growth rate as compared to the parental strain, MG1655 strain. Thus, the phenotype of a reduced-genome strain varies depending on the strain, and how the deletion of a chromosomal region exceeding 1000 kbp changes the properties of Escherichia coli is difficult to predict. Therefore, Escherichia coli defective in a region of not less than 1000 kbp in the chromosomal DNA does not necessarily show useful properties.

[0006] In addition, an E. coli mutant, which lacks regions of 1040 kbp or more on chromosomal DNA and a process for producing a useful substance using such mutant have not yet been known.
[0007] non-patent document 1: Science, 277, 1453 (1997)
[0008] non-patent document 2: Nucleic Acids Research, 34, 1 (2006)
[0009] non-patent document 3: J. Bacteriol., 180, 2063 (1998)
[0010] non-patent document 4: Science, 312, 1044 (2006)
[0011] non-patent document 5: Mol. Microbiol., 55, 137 (2005)
[0012] patent document 1: WO2006/057341

### DISCLOSURE OF THE INVENTION

### Problems to be Solved by the Invention

[0013] It is an object of the present invention to provide an industrially useful E. coli mutant strain that lacks regions of 1040 kbp or more on chromosomal DNA and a process for producing a useful substance using such mutant.

### Means of Solving the Problems

[0014] The present invention relates to the following (1)-(28).
[0015] (1) An E. coli mutant strain comprising chromosomal DNA comprising the following genes [1] or homologous genes thereof, not comprising the genes [2] or homologous genes thereof, and being at least 1040 kbp shorter than that of a wild-type E. coli strain, provided that when the following genes [1] or homologous genes thereof comprise genes that wild-type E. coli strains do not originally contain (hereafter referred to as “NC genes”), the aforementioned E. coli mutant strain derived from the wild-type E. coli strain does not necessarily have the NC gene.
[0016] [1] thrL gene, thrA gene, thrB gene, thrC gene, talB gene, mog gene, htgA gene, dnaK gene, dnaJ gene, mokC gene, hokC gene, sokC gene, nhaA gene, nhaR gene, rpsT gene, ribF gene, ileS gene, lspA gene, fkpB gene, ispH gene, rihC gene, dapB gene, carA gene, carB gene, caiF gene, caiE gene, caiD gene, caiC gene, caiB gene, caiA gene, caiT gene, fixA gene, fixB gene, fixC gene, fixX gene, kefF gene, kefC gene, folA gene, apaH gene, apaG gene, ksgA gene, pdxA gene, surA gene, imp gene, djlA gene, rluA gene, hepA gene, polB gene, leuD gene, leuC gene, leuB gene, leuA gene, leuL gene, leuO gene, ilvI gene, ilvH gene, fruR gene, mraZ gene, mraW gene, ftsL gene, ftsI gene, murE gene, murF gene, mraY gene, murD gene, ftsW gene, murG gene, murC gene, ddlB gene, ftsQ gene, ftsA gene, ftsZ gene, lpxC gene, secM gene, secA gene, mutT gene, coaE gene, guaC gene, hofC gene, hofB gene, ppdD gene, nadC gene, ampD gene, ampE gene, aroP gene, pdhR gene, aceE gene, aceF gene, lpd gene, acnB gene, speD gene, speE gene, cueO gene, gcd gene, hpt gene, can gene, panD gene, panC gene, panB gene, htrE gene, ecpD gene, folK gene, pcnB gene, dksA gene, sfsA gene, ligT gene, hrpB gene, mrcB gene, hemL gene, cicA gene, btuF gene, pfs gene, dgt gene, degP gene, cdaR gene, dapD gene, glnD gene, map gene, tff gene, rpsB gene, tsf gene, pyrH gene, frr gene, dxr gene, ispU gene, cdsA gene, hlpA gene, lpxD gene, fabZ gene, lpxA gene, lpxB gene, rnhB gene, dnaE gene, accA gene, ldcC gene, tilS gene, rof gene, nlpE gene, proS gene, rcsF gene, metQ gene, metI gene, metN gene, gmhB gene, rrsH gene, ileV gene, alaV gene, rrlH gene, rrfH gene, aspU gene, dkgB gene, mltD gene, gloB gene, rnhA gene, dnaQ gene, aspV gene, ivy gene, fadE gene, lpcA gene, pepD gene, gpt gene, frsA gene, crl gene, phoE gene, proB gene, proA gene, thrW gene, hemB gene, proC gene, aroL gene, aroM gene, rdgC gene, mak gene, araJ gene, sbcC gene, sbcD gene, phoB gene, phoR gene, brnQ gene, proY gene, malZ gene, queA gene, tgt gene, secD gene, secF gene, tsx gene, ribD gene, ribE gene, nusB gene, thiL gene, pgpA gene, dxs gene, ispA gene, xseB gene, thiI gene, panE gene, cyoE gene, cyoD gene, cyoC gene, cyoB gene, cyoA gene, ampG gene, bolA gene, tig gene, clpP gene, clpX gene, lon gene, hupB gene, ppiD gene, cof gene, mdlA gene, mdlB gene, glnK gene, amtB gene, tesB gene, ffs gene, maa gene, hha gene, acrB gene, acrA gene, acrR gene, kefA gene, priC gene, apt gene, dnaX gene, recR gene, htpG gene, adk gene, hemH gene, aes gene, gsk gene, fsr gene, ushA gene, copA gene, cueR gene, gcl gene, hyi gene, purK gene, purE gene, lpxH gene, ppiB gene, cysS gene, folD gene, sfmA gene, sfmC gene, sfmD gene, sfmH gene, sfmF gene, fimZ gene, argU gene, entD gene, fepA gene, fes gene, entF gene, fepE gene, fepC gene, fepG gene, fepD gene, fepB gene, entC gene, entE gene, entB gene, entA gene, cstA gene, dsbG gene, ahpC gene, ahpF gene, tatE gene, lipA gene, lipB gene, dacA gene, rlpA gene, mrdB gene, mrdA gene, cobC gene, nadD gene, holA gene, rlpB gene, leuS gene, lnt gene, miaB gene, ubiF gene, glnX gene, glnV gene, metU gene, glnW gene, glnU gene, leuW gene, metT gene, asnB gene, nagD gene, nagC gene, nagA gene, nagB gene, nagE gene, glnS gene, fur gene, fldA gene, seqA gene, pgm gene, potE gene, speF gene, kdpE gene, kdpD gene, kdpC gene, kdpB gene, kdpA gene, nei gene, abrB gene, gltA gene, sdhC gene, sdhD gene, sdhA gene, sdhB gene, sucA gene, sucB gene, sucC gene, sucD gene, mngR gene, mngA gene, mngB gene, cydA gene, cydB gene, tolQ gene, tolR gene, tolA gene, tolB gene, pal gene, lysT gene, valT gene, lysW gene, valZ gene, lysY gene, lysZ gene, lysQ gene, nadA gene, pnuC gene, zitB gene, aroG gene, gpmA gene, galM gene, galK gene, galT gene, galE gene, modF gene, modE gene, modA gene, modB gene, modC gene, bioA gene, bioB gene, bioF gene, bioC gene, bioD gene, uvrB gene, moaA gene, moaB gene, moaC gene, moaD gene, moaE gene, rhlE gene, dps gene, rhtA gene, ompX gene, rybA gene, mntR gene, fsaA gene, moeB gene, moeA gene, iaaA gene, cmr gene, rybB gene, grxA gene, poxB gene, her gene, hcp gene, aqpZ gene, macA gene, macB gene, cspD gene; clpS gene, clpA gene, serW gene, infA gene, aat gene, cydC gene, cydD gene, trxB gene, lrp gene, ftsK gene, lolA gene, serS gene, dmsA gene, dmsB gene, dmsC gene, pflA gene, pflB gene, focA gene, serC gene, aroA gene, cmk gene, rpsA gene, ihfB gene, msbA gene, lpxK gene, kdsB gene, smtA gene, mukF gene, mukE gene, mukB gene, aspC gene, ompF gene, asnS gene, pncB gene, pepN gene, ssuB gene, ssuC gene, ssuD gene, ssuA gene, ssuE gene, pyrD gene, uup gene, pqiA gene, pqiB gene, rmf gene, fabA gene, ompA gene, sulA gene, helD gene, mgsA gene, serT gene, hyaA gene, hyaB gene, hyaC gene, hyaD gene, hyaE gene, hyaF gene, appC gene, appB gene, appA gene, etp gene, serX gene, csgG gene, csgF gene, csgE gene, csgD gene, csgB gene, csgA gene, csgC gene, mdoC gene, mdoG gene, mdoH gene, msyB gene, mdtG gene, lpxL gene, solA gene, dinI gene, pyrC gene, grxB gene, mdtH gene, rimJ gene, mviM gene, mviN gene, flgN gene, flgM gene, flgA gene, flgB gene, flgC gene, flgD gene, figE gene, flgF gene, flgG gene, flgH gene, flgI gene, flgJ gene, flgK gene, flgL gene, rne gene, rluC gene, sraB gene, rpmF gene, plsX gene, fabH gene, fabD gene, fabG gene, acpP gene, fabF gene, pabC gene, tmk gene, holB gene, ptsG gene, fhuE gene, hinT gene, nagZ gene, ndh gene, mfd gene, lolC gene, lolD gene, lolE gene, cobB gene, potD gene, potC gene, potB gene, potA gene, pepT gene, phoQ gene, phoP gene, purB gene, hflD gene, trmU gene, minE gene, minD gene, minC gene, hlyE gene, umuD gene, umuC gene, dsbB gene, nhaB gene, fadR gene, dadA gene, dadX gene, cvrA gene, ldcA gene, emtA gene, treA gene, dhaH gene, dhaL gene, dhaK gene, dhaR gene, pth gene, prsA gene, ispE gene, lolB gene, hemA gene, prfA gene, prmC gene, kdsA gene, ldrA gene, rdlA gene, ldrB gene, rdlB gene, ldrC gene, rdlC gene, chaA gene, chaB gene, chaC gene, narL gene, narX gene, narK gene, narG gene, narH gene, narJ gene, narI gene, rttR gene, tpr gene, tyrV gene, tyrT gene, purU gene, rssA gene, rssB gene, galU gene, hns gene, tdk gene, adhE gene, oppA gene, oppB gene, oppC gene, oppD gene, oppF gene, cls gene, kch gene, tonB gene, ompW gene, trpA gene, trpB gene, trpC gene, trpD gene, trpE gene, trpL gene, rluB gene, btuR gene, sohB gene, topA gene, cysB gene, acnA gene, ribA gene, pgpB gene, pyrF gene, osmB gene, gmr gene, rnb gene, fabI gene, sapF gene, sapD gene, sapC gene, sapB gene, sapA gene, puuP gene, puuA gene, puuD gene, puuR gene, puuC gene, puuB gene, puuE gene, pspF gene, pspA gene, pspB gene, pspC gene, pspD gene, pspE gene, ompG gene, tyrR gene, tpx gene, mpaA gene, mppA gene, uspE gene, fnr gene, ogt gene, abgT gene, abgB gene, abgA gene, abgR gene, isrA gene, dbpA gene, uspF gene, ompN gene, micC gene, hslJ gene, ldhA gene, feaR gene, feaB gene, tynA gene, maoC gene, paaA gene, paaB gene, paaC gene, paaD gene, paaE gene, paaF gene, paaG gene, paaH gene, paaI gene, paaJ gene, paaK gene, paaX gene, paaY gene, azoR gene, hrpA gene, aldA gene, gapC_{—}2 gene, gapC_{—}1 gene, cybB gene, hokB gene, mokB gene, sokB gene, trg gene, mdoD gene, rimL gene, tehA gene, tehB gene, ansP gene, nhoA gene, narV gene, narW gene, narY gene, narZ gene, narU gene, fdnG gene, fdnH gene, fdnI gene, adhP gene, sfcA gene, sra gene, bdm gene, osmC gene, ddpF gene, ddpD gene, ddpC gene, ddpB gene, ddpA gene, ddpX gene, dos gene, gadC gene, gadB gene, pqqL gene, hipA gene, hipB gene, ego gene, lsrC gene, lsrD gene, lsrB gene, lsrF gene, lsrG gene, tam gene, uxaB gene, marC gene, marR gene, marA gene, marB gene, eamA gene, dcp gene, rspB gene, rspA gene, speG gene, dmsD gene, clcB gene, dgsA gene, asr gene, mdtI gene, mdtJ gene, pntB gene, pntA gene, folM gene, rstA gene, rstB gene, tus gene, fumC gene, fumA gene, manA gene, uidC gene, uidB gene, uidA gene, uidR gene, hdhA gene, malI gene, malX gene, malY gene, add gene, bin gene, rsxA gene, rsxB gene, rsxC gene, rsxD gene, rsxG gene, rsxE gene, nth gene, gst gene, pdxY gene, tyrS gene, pdxH gene, slyB gene, slyA gene, sodC gene, nemA gene, gloA gene, rnt gene, lhr gene, sodB gene, purR gene, cfa gene, ribC gene, mdtK gene, valV gene, valW gene, pykF gene, lpp gene, sufE gene, sufS gene, sufD gene, sufC gene, sufB gene, sufA gene, rydB gene, rprA gene, aroD gene, pps gene, aroH gene, nlpC gene, btuD gene, btuE gene, btuC gene, ihfA gene, pheT gene, pheS gene, pheM gene, rplT gene, rpmI gene, infC gene, thrS gene, arpB_{—}1 gene, arpB_{—}2 gene, pfkB gene, cedA gene, katE gene, chbG gene, chbF gene, chbR gene, chbA gene, chbC gene, chbB gene, osmE gene, nadE gene, spy gene, astE gene, astB gene, astD gene, astA gene, astC gene, xthA gene, nudG gene, gdhA gene, topB gene, selD gene, sppA gene, ansA gene, gapA gene, mipA gene, rnd gene, fadD gene, pabB gene, sdaA gene, manX gene, manY gene, manZ gene, rrmA gene, cspC gene, kdgR gene, htpX gene, prc gene, proQ gene, pphA gene, ryeA gene, ryeB gene, holE gene, exoX gene, ptrB gene, purT gene, eda gene, edd gene, zwf gene, pykA gene, lpxM gene, znuA gene, znuC gene, znuB gene, ruvB gene, ruvA gene, ruvC gene, nudB gene, aspS gene, torZ gene, torY gene, cutC gene, argS gene, leuZ gene, cysT gene, glyW gene, pgsA gene, dsrA gene, serU gene, asnT gene, shiA gene, amn gene, asnW gene, asnU gene, cbl gene, nac gene, asnV gene; erfK gene, cobT gene, cobS gene, cobU gene, sbmC gene, dacD gene, sbcB gene, hisL gene, hisG gene, hisD gene, hisC gene, hisB gene, hisH gene, hisA gene, hisF gene, hisI gene, cld gene, ugd gene, gnd gene, galF gene, wcaM gene, wcaL gene, wcaK gene, wzxC gene, wcaJ gene, cpsG gene, cpsB gene, wcaI gene, nudD gene, fcl gene, gmd gene, wcaF gene, wcaE gene, wcaD gene, wcaC gene, wcaB gene, wcaA gene, wzc gene, wzb gene, wza gene, asmA gene, dcd gene, udk gene, thiD gene, thiM gene, mrp gene, metG gene, dusC gene, cdd gene, sanA gene, mglC gene, mglA gene, mglB gene, galS gene, folE gene, cirA gene, lysP gene, nfo gene, fruA gene, fruK gene, fruB gene, setB gene, spr gene, rtn gene, bcr gene, rsuA gene, rplY gene, proL gene, narP gene, ccmH gene, ccmG gene, ccmF gene, ccmE gene, ccmD gene, ccmC gene, ccmB gene, ccmA gene, napC gene, napB gene, napH gene, napG gene, napA gene, napD gene, napF gene, eco gene, mqo gene, alkB gene, ada gene, ompC gene, micF gene, rcsD gene, rcsB gene, rcsC gene, atoS gene, atoC gene, atoD gene, atoA gene, atoE gene, atoB gene, gyrA gene, ubiG gene, nrdA gene, nrdB gene, inaA gene, glpQ gene, glpT gene, glpA gene, glpB gene, glpC gene, ais gene, arnT gene, pmrD gene, menE gene, menC gene, menB gene, menD gene, menF gene, nuoN gene, nuoM gene, nuoL gene, nuoK gene, nuoJ gene, nuoI gene, nuoH gene, nuoG gene, nuoF gene, nuoE gene, nuoC gene, nuoB gene, nuoA gene, lrhA gene, ackA gene, pta gene, ubiX gene, purF gene, cvpA gene, dedD gene, folC gene, accD gene, dedA gene, truA gene, usg gene, pdxB gene, flk gene, fabB gene, trmC gene, mepA gene, aroC gene, prmB gene, sixA gene, fadL gene, vacJ gene, argW gene, dsdC gene, dsdX gene, dsdA gene, emrY gene, emrK gene, evgA gene, evgS gene, oxc gene, frc gene, ddg gene, glk gene, mntH gene, nupC gene, alaX gene, alaW gene, gltX gene, valU gene, valX gene, valY gene, lysV gene, xapR gene, xapB gene, xapA gene, ligA gene, zipA gene, cysZ gene, cysK gene, ptsH gene, ptsI gene, crr gene, pdxK gene, cysM gene, cysA gene, cysW gene, cysU gene, cysP gene, ucpA gene, murP gene, amiA gene, hemF gene, eutL gene, eutC gene, eutB gene, eutA gene, eutH gene, eutG gene, eutJ gene, eutE gene, cchB gene, cchA gene, eutI gene, eutT gene, eutQ gene, eutP gene, maeB gene, talA gene, tktB gene, aegA gene, narQ gene, acrD gene, dapE gene, purC gene, nlpB gene, dapA gene, gcvR gene, bcp gene, hda gene, uraA gene, upp gene, purM gene, purN gene, ppk gene, ppx gene, guaA gene, guaB gene, xseA gene, der gene, hisS gene, ispG gene, ndk gene, pbpC gene, sseA gene, ryfA gene, sseB gene, pepB gene, fdx gene, hscA gene, hscB gene, iscA gene, iscU gene, iscS gene, iscR gene, suhB gene, csiE gene, hcaT gene, hcaR gene, hcaE gene, hcaF gene, hcaC gene, hcaB gene, hcaD gene, glyA gene, hmp gene, glnB gene, sroF gene, purL gene, tadA gene, acpS gene, pdxJ gene, recO gene, era gene, rnc gene, lepB gene, lepA gene, rseC gene, rseB gene, rseA gene, rpoE gene, nadB gene, srmB gene, ung gene, trxC gene, pssA gene, kgtP gene, rrfG gene, rrlG gene, gitW gene, rrsG gene, clpB gene, rluD gene, pheL gene, pheA gene, tyrA gene, aroF gene, rplS gene, trmD gene, rimM gene, rpsP gene, ffh gene, grpE gene, recN gene, smpA gene, smpB gene, ssrA gene, gabD gene, gabT gene, gabP gene, nrdF gene, mprA gene, emrA gene, emrB gene, luxS gene, sraD gene, gshA gene, argQ gene, argZ gene, argY gene, argV gene, serV gene, csrA gene, alaS gene, recX gene, recA gene, mltB gene, norR gene, norV gene, norW gene, hypF gene, hydN gene, ascG gene, ascF gene, ascB gene, hycI gene, hycH gene, hycG gene, hycF gene, hycE gene, hycD gene, hycC gene, hycB gene, hycA gene, hypA gene, hypB gene, hypC gene, hypD gene, hypE gene, fhlA gene, mutS gene, pphB gene, rpoS gene, nlpD gene, pcm gene, surE gene, truD gene, ispF gene, ispD gene, ftsB gene, cysC gene, cysN gene, cysD gene, iap gene, cysH gene, cysI gene, cysJ gene, eno gene, pyrG gene, mazG gene, chpR gene, relA gene, rumA gene, barA gene, gudD gene, gudX gene, gudP gene, mltA gene, metZ gene, metW gene, metV gene, amiC gene, argA gene, recD gene, recB gene, ptr gene, recC gene, ppdC gene, ppdB gene, ppdA gene, thyA gene, lgt gene, ptsP gene, nudH gene, mutH gene, tas gene, aas gene, rygA gene, rygB gene, galR gene, lysA gene, lysR gene, araE gene, kduD gene, kduI gene, lysS gene, prfB gene, recJ gene, dsbC gene, xerD gene, fldB gene, bglA gene, gcvP gene, gcvH gene, gcvT gene, visC gene, ubiH gene, pepP gene, zapA gene, ssrS gene, rygC gene, serA gene, rpiA gene, argP gene, argK gene, argO gene, mscS gene, fbaA gene, pgk gene, epd gene, tktA gene, speB gene, speA gene, metK gene, galP gene, sprT gene, endA gene, gshB gene, ansB gene, mutY gene, mltC gene, nupG gene, speC gene, pheV gene, pitB gene, gss gene, hybG gene, hybF gene, hybE gene, hybD gene, hybC gene, hybB gene, hybA gene, hybO gene, exbD gene, exbB gene, metC gene, dkgA gene, sufI gene, plsC gene, parC gene, parE gene, cpdA gene, nudF gene, tolC gene, zupT gene, ribB gene, glgS gene, rygD gene, rfaE gene, glnE gene, htrG gene, cca gene, bacA gene, folB gene, ttdA gene, ttdB gene, rpsU gene, dnaG gene, rpoD gene, ileX gene, aer gene, ebgR gene, ebgA gene, ebgC gene, uxaA gene, uxaC gene, exuT gene, exuR gene, tdcG gene, tdcF gene, tdcE gene, tdcD gene, tdcC gene, tdcB gene, tdcA gene, tdcR gene, rnpB gene, garK gene, garR gene, garL gene, garP gene, garD gene, sohA gene, agaR gene, kbaZ gene, agaV gene, agaW gene, agaA gene, agaS gene, kbaY gene, agaB gene, agaC gene, agaD gene, agaI gene, mtr gene, deaD gene, nlpI gene, pnp gene, sraG gene, rpsO gene, truB gene, rbfA gene, infB gene, nusA gene, metY gene, argG gene, leuU gene, secG gene, glmM gene, folP gene, ftsH gene, rrmJ gene, greA gene, dacB gene, obgE gene, rpmA gene, rplU gene, ispB gene, sfsB gene, murA gene, kdsD gene, kdsC gene, rpoN gene, ptsN gene, npr gene, mtgA gene, elbB gene, ryhA gene, arcB gene, gltB gene, gltD gene, nanT gene, nanA gene, nanR gene, dcuD gene, sspB gene, sspA gene, rpsI gene, rplM gene, degQ gene, degS gene, mdh gene, argR gene, aaeB gene, aaeA gene, aaeX gene, aaeR gene, tldD gene, rng gene, mreD gene, mreC gene, mreB gene, accB gene, accC gene, panF gene, prmA gene, dusB gene, fis gene, rrfF gene, thrV gene, rrfD gene, rrlD gene, gltV gene, rrsD gene, purH gene, purD gene, zraR gene, zraS gene, zraP gene, hupA gene, nfi gene, hemE gene, nudC gene, rsd gene, thiC gene, thiE gene, thiF gene, thiS gene, thiG gene, thiH gene, htrC gene, rpoC gene, rpoB gene, rplL gene, rplJ gene, rplA gene, rplK gene, nusG gene, secE gene, tufB gene, thrT gene, glyT gene, tyrU gene, thrU gene, coaA gene, birA gene, murB gene, rrfB gene, rrlB gene, gltT gene, rrsB gene, murI gene, btuB gene, trmA gene, fabR gene, sthA gene, oxyR gene, oxyS gene, argH gene, argB gene, argC gene, argE gene, ppc gene, fsaB gene, gldA gene, katG gene, metF gene, metL gene, metB gene, metJ gene, rpmE gene, priA gene, cytR gene, ftsN gene, hslV gene, hslU gene, menA gene, rraA gene, glpF gene, glpK gene, glpX gene, fpr gene, tpiA gene, cdh gene, sbp gene, pfkA gene, fieF gene, cpxP gene, cpxR gene, cpxA gene, kdgT gene, sodA gene, fdhD gene, fdoG gene, fdoH gene, fdoI gene, fdhE gene, bipA gene, ginA gene, glnL gene, glnG gene, hemN gene, csrC gene, spf gene, polA gene, dsbA gene, mobA gene, mobB gene, rrfA gene, rrlA gene, alaT gene, ileT gene, rrsA gene, hemG gene, trkH gene, pepQ gene, fadB gene, fadA gene, fre gene, ubiD gene, rfaH gene, tatD gene, tatC gene, tatB gene, tatA gene, ubiB gene, ubiE gene, rmuC gene, udp gene, metE gene, metR gene, pldB gene, rhtB gene, rhtC gene, recQ gene, pidA gene, rarD gene, corA gene, uvrD gene, xerC gene, dapF gene, cyaY gene, cyaA gene, hemC gene, hemD gene, hemX gene, hemY gene, ryiA gene, aslA gene, aslB gene, proM gene, leuT gene, hisR gene, argX gene, rffM gene, wzyE gene, rffT gene, wzxE gene, rffA gene, rffC gene, rffH gene, rffG gene, rffD gene, rffE gene, wzzE gene, rfe gene, rho gene, rhoL gene, trxA gene, rhlB gene, gpp gene, rep gene, ppiC gene, ilvC gene, ilvY gene, ilvA gene, ilvD gene, ilvE gene, ilvM gene, ilvG_{—}2 gene, ilvG_{—}1 gene, ilvL gene, hdfR gene, trpT gene, aspT gene, rrfC gene, rr1C gene, gltU gene, rrsC gene, asnC gene, mioC gene, oriC gene, gidA gene, gidB gene, atpI gene, atpB gene, atpE gene, atpF gene, atpH gene, atpA gene, atpG gene, atpD gene, atpC gene, glmU gene, glmS gene, pstS gene, pstC gene, pstA gene, pstB gene, phoU gene, bglG gene, bglF gene, bglB gene, bglH gene, cbrC gene, mdtL gene, tnaB gene, tnaA gene, tnaC gene, trmE gene, rnpA gene, rpmH gene, dnaA gene, dnaN gene, recF gene, gyrB gene, ibpA gene, ibpB gene, emrD gene, ivbL gene, ilvB gene, ilvN gene, uhpA gene, uhpB gene, uhpC gene, uhpT gene, selC gene, gltS gene, recG gene, trmH gene, spoT gene, rpoZ gene, gmk gene, ligB gene, dinD gene, rph gene, pyrE gene, ttk gene, dut gene, dfp gene, rpmB gene, rpmG gene, mutM gene, coaD gene, kdtA gene, rfaQ gene, rfaG gene, rfaP gene, rfaS gene, rfaB gene, rfaI gene, rfaJ gene, rfaY gene, rfaZ gene, rfaK gene, rfaL gene, rfaC gene, rfaF gene, rfaD gene, htrL gene, kbl gene, tdh gene, envC gene, gpmI gene, grxC gene, secB gene, gpsA gene, cysE gene, lldD gene, lldR gene, lldP gene, mtlR gene, mtlD gene, mtlA gene, selA gene, selB gene, aldB gene, sgbE gene, sgbU gene, sgbH gene, lyxK gene, avtA gene, malS gene, bax gene, xylR gene, xylH gene, xylG gene, xylF gene, xylA gene, xylB gene, glyQ gene, glyS gene, hokA gene, cspA gene, tiaE gene, bisC gene, tag gene, eptB gene, proK gene, dppA gene, dppB gene, dppC gene, dppD gene, dppF gene, rdlD gene, ldrD gene, bcsG gene, bcsF gene, bcsE gene, bcsA gene, bcsB gene, bcsZ gene, bcsC gene, dctA gene, kdgK gene, treF gene, gadA gene, gadX gene, gadY gene, gadW gene, mdtF gene, mdtE gene, gadE gene, hdeD gene, hdeA gene, hdeB gene, slp gene, arsC gene, arsB gene, arsR gene, gor gene, prlC gene, uspA gene, pitA gene, nikR gene, nikE gene, nikD gene, nikC gene, nikB gene, nikA gene, acpT gene, dcrB gene, zntA gene, ftsY gene, ftsE gene, ftsX gene, rpoH gene, livJ gene, livK gene, livH gene, livM gene, livG gene, livF gene, ugpB gene, ugpA gene, ugpE gene, ugpC gene, ugpQ gene, ggt gene, gntR gene, gntK gene, gntU gene, asd gene, glgB gene, glgX gene, glgC gene, glgA gene, glgP gene, glpD gene, glpE gene, glpG gene, glpR gene, rtcR gene, rtcB gene, rtcA gene, malT gene, malP gene, malQ gene, gntT gene, gntY gene, gntX gene, bioH gene, feoB gene, feoA gene, greB gene, ompR gene, envZ gene, pck gene, hslO gene, hslR gene, nudE gene, mrcA gene, hofQ gene, aroK gene, aroB gene, damX gene, dam gene, rpe gene, gph gene, trpS gene, cysG gene, nirC gene, nirD gene, nirB gene, tsgA gene, ppiA gene, fic gene, pabA gene, argD gene, crp gene, prkB gene, kefG gene, kefB gene, slyD gene, slyX gene, fkpA gene, rpsL gene, rpsG gene, fusA gene, tufA gene, rpsJ gene, rplC gene, rplD gene, rplW gene, rplB gene, rpsS gene, rplV gene, rpsC gene, rplP gene, rpmC gene, rpsQ gene, rplN gene, rplX gene, rplE gene, rpsN gene, rpsH gene, rplF gene, rplR gene, rpsE gene, rpmD gene, rpmlO gene, secY gene, rpmJ gene, rpsM gene, rpsK gene, rpsD gene, rpoA gene, rplQ gene, zntR gene, mscL gene, trkA gene, rsmB gene, fmt gene, def gene, smf gene, smg gene, aroE gene, rrsE gene, ileU gene, alaU gene, rrlE gene, rrfE gene, metA gene, aceB gene, aceA gene, aceK gene, arpA gene, iclR gene, metH gene, pepE gene, lysC gene, pgi gene, ubiC gene, ubiA gene, plsB gene, dgkA gene, lexA gene, dinF gene, zur gene, qor gene, dnaB gene, alr gene, tyrB gene, aphA gene, uvrA gene, ssb gene, soxS gene, soxR gene, ryjA gene, actP gene, acs gene, nrfA gene, nrfB gene, nrfC gene, nrfD gene, nrfE gene, nrfF gene, nrfG gene, gltP gene, fdhF gene, rpiR gene, rpiB gene, proP gene, basS gene, basR gene, eptA gene, adiC gene, adiY gene, adiA gene, melR gene, melA gene, melB gene, fumB gene, dcuB gene, dcuR gene, dcuS gene, lysU gene, cadA gene, cadB gene, cadC gene, pheU gene, dipZ gene, cutA gene, dcuA gene, aspA gene, fxsA gene, groS gene, groL gene, efp gene, ecnA gene, ecnB gene, sugE gene, blc gene, ampC gene, frdD gene, frdC gene, frdB gene, frdA gene, poxA gene, psd gene, rsgA gene, orn gene, glyV gene, glyX gene, glyY gene, amiB gene, mutL gene, miaA gene, hfq gene, hflX gene, hflK gene, hflC gene, purA gene, rnr gene, rlmB gene, ulaF gene, rpsF gene, priB gene, rpsR gene, rplI gene, fklB gene, cycA gene, cpdB gene, cysQ gene, msrA gene, chpS gene, chpB gene, ppa gene, fbp gene, mpl gene, pmbA gene, cybC gene, nrdG gene, nrdD gene, treC gene, treB gene, treR gene, mgtA gene, pyrI gene, pyrB gene, pyrL gene, argI gene, valS gene, holC gene, pepA gene, idnR gene, idnT gene, idnO gene, idnD gene, idnK gene, leuX gene, dnaC gene, dnaT gene, bglJ gene, fhuF gene, leuV gene, leuP gene, leuQ gene, rsmC gene, holD gene, rimI gene, prfC gene, osmY gene, deoC gene, deoA gene, deoB gene, deoD gene, lplA gene, serB gene, radA gene, nadR gene, slt gene, trpR gene, rob gene, creA gene, creB gene, creC gene, creD gene, arcA gene
[0017] [2]fhuA gene, fhuC gene, fhuD gene, fhuB gene, yafJ gene, yafK gene, yafQ gene, dinJ gene, yafL gene, yafM gene, fhiA gene, mbhA gene, dinB gene, yafN gene, yafO gene, yafP gene, ykfJ gene, prfH gene, yagP gene, yagQ gene, yagR gene, yagS gene, yagT gene, yagU gene, ykgJ gene, yagV gene, yagW gene, yagX gene, yagY gene, yagZ gene, ykgK gene, ykgL gene, ykgM(JW5034) gene, ykgM(JW5035) gene, eaeH gene, ykgA gene, ykgB gene, ykgI gene, ykgC gene, ykgD gene, ykgE gene, ykgF gene, ykgG gene, ykgH gene, betA gene, betB gene, betI gene, betT gene, yahA gene, yahB gene, yahC gene, yahD gene, yahE gene, yahF gene, yahG gene, yahH gene, yahI gene, yahJ gene, yahK gene, yahL gene, yahM gene, yahN gene, yahO gene, prpR gene, prpB gene, prpC gene, prpD gene, prpE gene, codB gene, codA gene, cynR gene, cynT gene, cynS gene, cynX gene, lacA gene, lacY gene, lacZ gene, lacI gene, mhpR gene, mhpA gene, mhpB gene, mhpC gene, mhpD gene, mhpF gene, mhpE gene, mhpT gene, yaiL gene, frmB gene, frmA gene, frmR gene, yaiO gene, yaiX gene, yaiF gene, yaiP gene, yaiS gene, tauA gene, tauB gene, tauC gene, tauD gene, yaiT gene, yaiU gene, yaiV gene, ampH gene, sbmA gene, yaiW gene, yaiY gene, yaiZ gene, ddlA gene, yaiB gene, phoA gene, psiF gene, yaiC gene, ybbO gene, tesA gene, ybbA gene, ybbP gene, ylbG gene, ybbB gene, ybbS gene, allA gene, allR gene, glxR gene, ybbV gene, ybbW gene, allB gene, ybbY gene, glxK gene, ylbA gene, allC gene, allD gene, fdrA gene, ylbE_{—}1 gene, ylbE_{—}2 gene, ylbF gene, ybcF gene, envY gene, ybcH gene, nfrA gene, nfrB gene, cusS gene, cusR gene, cusC gene, cusF gene, cusB gene, cusA gene, pheP gene, ybdG gene, nfnB gene, ybdF gene, ybdJ gene, ybdK gene, hokE gene, ybeL gene, ybeQ gene, ybeR gene, djlB gene, ybeT gene, ybeU gene, djlC gene, hscC gene, rihA gene, gltL gene, gltK gene, gltJ gene, gltI gene, kdpF gene, ybfA gene, ybgA gene, phr gene, ybiA gene, dinG gene, ybiB gene, ybiC gene, ybiJ gene, ybiI gene, ybiX gene, fiu gene, ybiM gene, ybiN gene, ybiO gene, glnQ gene, glnP gene, glnH gene, yliA gene, yliB gene, yliC gene, yliD gene, yliE gene, yliF gene, yliG gene, yliH gene, yliI gene, yliJ gene, dacC gene, deoR gene, ybjG gene, ybjC gene, nfsA gene, rimK gene, ybjN gene, potF gene, potG gene, potH gene, potI gene, ybjO gene, rumB gene, artJ gene, artM gene, artQ gene, artI gene, artP gene, ybjP gene, ybjQ gene, ybjR gene, ybjS gene, ybjT gene, ltaE gene, ymcC gene, ymcD gene, cspH gene, cspG gene, ymcE gene, gnsA gene, yccM gene, torS gene, torT gene, torR gene, torC gene, torA gene, torD gene, cbpM gene, cbpA gene, yccE gene, agp gene, yccJ gene, wrbA gene, ymdF gene, ycdG gene, ycdH gene, ycdI gene, rarA gene, ycdK gene, ycdL gene, ycdM gene, ycdC gene, putA gene, putP gene, ycdN_{—}1 gene, ycdN_{—}2 gene, ycdO gene, ycdB gene, phoH gene, ycdP gene, ycdQ gene, ycdR gene, ycdS gene, ycdT gene, ymdE gene, ycdU gene, elbA gene, ycgX gene, ycgE gene, ycgF gene, ycgZ gene, ymgA gene, ymgB gene, ymgC gene, ycgG gene, ymgF gene, ycgH_{—}1 gene, ycgH_{—}2 gene, ymgD gene, ymgG gene, ymgH gene, ycgI gene, ydfH gene, ydfZ gene, ydfI gene, ydfJ gene, yecT gene, flhE gene, flhA gene, flhB gene, cheZ gene, cheY gene, cheB gene, cheR gene, tap gene, tar gene, cheW gene, cheA gene, motB gene, motA gene, flhC gene, flhD gene, yecG gene, otsA gene, otsB gene, araH gene, araG gene, araF gene, yecI gene, yecJ gene, isrB gene, yecR gene, ftn gene, yecH gene, tyrP gene, uvrC gene, uvrY gene, yecF gene, sdiA gene, yecC gene, yecS gene, yedO gene, fliY gene, fliZ gene, fliA gene, fliC gene, fliD gene, fliS gene, fliT gene, amyA gene, yedD gene, yedE gene, yedF gene, yedK gene, yedL gene, yedN_{—}2 gene, yedN_{—}1 gene, yedM gene, intG gene, fliE gene, fliF gene, fliG gene, fliH gene, fliI gene, fliJ gene, fliK gene, fliL gene, fliM gene, fliN gene, fliO gene, fliP gene, fliQ gene, fliR gene, rcsA gene, dsrB gene, yodD gene, yedA gene, vsr gene, dcm gene, yedJ gene, yedR gene, yedS_{—}1 gene, yedS_{—}2 gene, yedS_{—}3 gene, hchA gene, yedV gene, yedW gene, yedX gene, yedY gene, yedZ gene, yodA gene, wbbL_{—}2 gene, wbbL_{—}1 gene, wbbK gene, wbbJ gene, wbbI gene, wbbH gene, glf gene, rfbX gene, rfbC gene, rfbA gene, rfbD gene, rfbB gene, yegE gene, alkA gene, yegD gene, yegI gene, yegJ gene, yegK gene, yegL gene, ryeC gene, ryeD gene, mdtA gene, mdtB gene, mdtC gene, mdtD gene, baeS gene, baeR gene, yegP gene, yegQ gene, ryeE gene, ogrK gene, yegZ gene, yegR gene, yegS gene, gatR_{—}1 gene, gatR_{—}2 gene, gatD gene, gatC gene, gatB gene, gatA gene, gatZ gene, gatY gene, fbaB gene, yegT gene, yegU gene, yegV gene, yegW gene, yegX gene, molR_{—}1 gene, molR_{—}2 gene, molR_{—}3 gene, yehI gene, yehK gene, yehL gene, yehM gene, yehP gene, yehQ gene, yehR gene, yehS gene, yehT gene, yehU gene, mlrA gene, yohO gene, yehW gene, yehX gene, yehY gene, yehZ gene, bglX gene, dld gene, pbpG gene, yohC gene, yeiI gene, yeiJ gene, rihB gene, yeiL gene, yeiM gene, yeiN gene, yeiC gene, elaB gene, elaA gene, elaC gene, elaD gene, yfbK gene, yfbL gene, yfbM gene, yfbN gene, yfbO gene, yfbP gene, yfcC gene, yfcD gene, yfcE gene, yfcF gene, yfcG gene, folX gene, yfcH gene, yfcI gene, hisP gene, hisM gene, hisQ gene, hisJ gene, argT gene, ypdA gene, ypdB gene, ypdC gene, ypdD gene, ypdE gene, ypdF gene, ypdG gene, ypdH gene, pinH gene, ypjB gene, ypjC gene, ileY gene, ygaQ gene, ygaR gene, yqaC gene, yqaD gene, ygaT gene, csiR gene, ygaU gene, yqaE gene, ygaV gene, ygaP gene, stpA gene, ygaW gene, ygaC gene, ygaM gene, nrdH gene, nrdI gene, nrdE gene, proV gene, proW gene, proX gene, ygaX gene, ygaY gene, ygaZ gene, ygaH gene, srlA gene, srlE gene, srlB gene, srlD gene, gutM gene, srlR gene, gutQ gene, yqeG gene, yqeH gene, yqeI gene, yqeJ gene, yqeK gene, ygeF gene, ygeG gene, ygeH gene, ygeI gene, pbl gene, ygeK gene, ygeL gene, ygeM gene, ygeN gene, ygeO gene, ygeP gene, ygeQ gene, glyU gene, ygeR gene, xdhA gene, xdhB gene, xdhC gene, ygeV gene, ygeW gene, ygeX gene, ygeY gene, hyuA gene, yqeA gene, yqeB gene, yqeC gene, ygfJ gene, ygfK gene, ssnA gene, ygfM gene, xdhD gene, ygfO gene, guaD gene, ygfQ gene, ygfS gene, ygfT gene, ygfU gene, idi gene, cmtA gene, cmtB gene, yghD gene, yghE gene, yghF gene, yghG gene, pppA gene, yghJ gene, yghK gene, glcB gene, glcG gene, glcF gene, glcE gene, glcD gene, glcC gene, yghO gene, yghQ gene, yghR gene, yghS gene, yghT gene, ygiS gene, ygiT gene, ygiU gene, ygiV gene, ygiW gene, qseB gene, qseC gene, ygiZ gene, mdaB gene, ygiN gene, gltF gene, yhcA gene, yhcD gene, yhcE gene, yhcF gene, yhcG gene, yhcH gene, nanK gene, nanE gene, yhdJ gene, yhdU gene, envR gene, acrE gene, acrF gene, yhdV gene, yhdW gene, yhdX gene, yhdY gene, yijP gene, yijO gene, frwD gene, pflC gene, pflD gene, frwB gene, frwC gene, ptsA gene, rhaT gene, rhaR gene, rhaS gene, rhaB gene, rhaA gene, rhaD gene, yiiL gene, frvA gene, frvB gene, frvX gene, frvR gene, yiiG gene, yiiF gene, yiiE gene, yiiD gene, dtd gene, rbn gene, yihX gene, yihW gene, yihV gene, yihU gene, yihT gene, yihS gene, yihR gene, yihQ gene, yihP gene, yihO gene, ompL gene, yihN gene, yihM gene, yihL gene, hsrA gene, rbsR gene, rbsK gene, rbsB gene, rbsC gene, rbsA gene, rbsD gene, trkD gene, yieN gene, yieM gene, asnA gene, yidB gene, yidA gene, yidX gene, dgoR gene, dgoK gene, dgoA gene, dgoB gene, dgoT gene, cbrA gene, yidR gene, yidQ gene, yidE gene, yidP gene, glvC gene, glvB gene, glvG gene, ysdC gene, yidL gene, yidK gene, yidJ gene, yidI gene, yidH gene, yidG gene, yidF gene, yhiN gene, yhiM gene, yhiL gene, yhiK gene, yhiJ gene, yhiI gene, rbbA gene, yhhJ gene, chiA gene, bfd gene, bfr gene, gspO gene, gspM gene, gspL gene, gspK gene, gspJ gene, gspI gene, gspH gene, gspG gene, gspF gene, gspE gene, gspD gene, gspC gene, gspA gene, pioO gene, yjbE gene, yjbF gene, yjbG gene, yjbH gene, yjbA gene, xylE gene, malG gene, malF gene, malE gene, malK gene, lamB gene, malM gene, yjbI gene, yjcP gene, yjcQ gene, yjcR gene, yjcS gene, alsK gene, alsE gene, alsC gene, alsA gene, alsB gene, yjdP gene, phnP gene, phnO gene, phnN gene, phnM gene, phnL gene, phnK gene, phnJ gene, phnI gene, phnH gene, phnG gene, phnF gene, phnE(JW4064) gene, phnE(JW4065) gene, phnD gene, phnC gene, phnB gene, phnA gene, yjdA gene, yjcZ gene, yjfI gene, yjfJ gene, yjfK gene, yjfL gene, yjfM gene, yjfC gene, aidB gene, yjfN gene, yjfO gene, yjfP gene, ulaR gene, ulaG gene, ulaA gene, ulaB gene, ulaC gene, ulaD gene, ulaE gene, yjhS gene, yjhT gene, yjhA gene, fimB gene, fimE gene, fimA gene, fimI gene, fimC gene, fimD gene, fimF gene, fimG gene, fimH gene, gntP gene, uxuA gene, uxuB gene, uxuR gene, yjiC gene, yjiD gene, yjiE gene, iadA gene, yjiG gene, yjiH gene, kptA gene, yjiJ gene, yjiK gene, yjiL gene, yjiM gene, yjiN gene, yjiO gene, yjiP gene, yjiQ gene, yjiR gene, yjiS gene, yjiT gene, yjiV gene, mcrC gene, mcrB gene, yjiW gene, hsdS gene, hsdM gene, hsdR gene, mrr gene, yjiA gene, yjiX gene, yjiY gene, tsr gene, yjiZ gene, yjjM gene, yjjN gene, mdoB gene, yjjA gene.
[0018] (2) The E. coli mutant strain according to above (1) comprising chromosomal DNA that comprises DNA having the nucleotide sequences as shown in [1] to [83] below of the nucleotide sequence as shown in SEQ ID NO: 1 or DNA equivalent thereto:
[0019] [1] a nucleotide sequence of nucleotides 1 to 15298
[0020] [2] a nucleotide sequence of nucleotides 16751 to 19620
[0021] [3] a nucleotide sequence of nucleotides 20815 to 65857
[0022] [4] a nucleotide sequence of nucleotides 78797 to 167400
[0023] [5] a nucleotide sequence of nucleotides 173316 to 244300
[0024] [6] a nucleotide sequence of nucleotides 253747 to 262299
[0025] [7] a nucleotide sequence of nucleotides 387868 to 389474
[0026] [8] a nucleotide sequence of nucleotides 404040 to 518365
[0027] [9] a nucleotide sequence of nucleotides 533048 to 535840
[0028] [10] a nucleotide sequence of nucleotides 550552 to 564276
[0029] [11] a nucleotide sequence of nucleotides 608455 to 640668
[0030] [12] a nucleotide sequence of nucleotides 659193 to 675439
[0031] [13] a nucleotide sequence of nucleotides 689711 to 729156
[0032] [14] a nucleotide sequence of nucleotides 739930 to 832888
[0033] [15] a nucleotide sequence of nucleotides 848427 to 867974
[0034] [16] a nucleotide sequence of nucleotides 883811 to 891334
[0035] [17] a nucleotide sequence of nucleotides 909717 to 1049224
[0036] [18] a nucleotide sequence of nucleotides 1097358 to 1105534
[0037] [19] a nucleotide sequence of nucleotides 1106991 to 1196528
[0038] [20] a nucleotide sequence of nucleotides 1225485 to 1295721
[0039] [21] a nucleotide sequence of nucleotides 1297023 to 1300822
[0040] [22] a nucleotide sequence of nucleotides 1302896 to 1397636
[0041] [23] a nucleotide sequence of nucleotides 1399079 to 1413662
[0042] [24] a nucleotide sequence of nucleotides 1436899 to 1469664
[0043] [25] a nucleotide sequence of nucleotides 1472404 to 1504839
[0044] [26] a nucleotide sequence of nucleotides 1506619 to 1528866
[0045] [27] a nucleotide sequence of nucleotides 1534766 to 1630050
[0046] [28] a nucleotide sequence of nucleotides 1654610 to 1853604
[0047] [29] a nucleotide sequence of nucleotides 1864144 to 1875287
[0048] [30] a nucleotide sequence of nucleotides 1888500 to 1963662
[0049] [31] a nucleotide sequence of nucleotides 1992215 to 1995800
[0050] [32] a nucleotide sequence of nucleotides 2027349 to 2032587
[0051] [33] a nucleotide sequence of nucleotides 2043516 to 2068287
[0052] [34] a nucleotide sequence of nucleotides 2081066 to 2103531
[0053] [35] a nucleotide sequence of nucleotides 2115204 to 2145402
[0054] [36] a nucleotide sequence of nucleotides 2186995 to 2199807
[0055] [37] a nucleotide sequence of nucleotides 2228990 to 2255033
[0056] [38] a nucleotide sequence of nucleotides 2262631 to 2292234
[0057] [39] a nucleotide sequence of nucleotides 2293834 to 2324498
[0058] [40] a nucleotide sequence of nucleotides 2322075 to 2411311
[0059] [41] a nucleotide sequence of nucleotides 2413007 to 2422503
[0060] [42] a nucleotide sequence of nucleotides 2433238 to 2471990
[0061] [43] a nucleotide sequence of nucleotides 2482140 to 2504213
[0062] [44] a nucleotide sequence of nucleotides 2513697 to 2519690
[0063] [45] a nucleotide sequence of nucleotides 2521089 to 2599856
[0064] [46] a nucleotide sequence of nucleotides 2613439 to 2754814
[0065] [47] a nucleotide sequence of nucleotides 2788619 to 2794311
[0066] [48] a nucleotide sequence of nucleotides 2800029 to 2803445
[0067] [49] a nucleotide sequence of nucleotides 2809286 to 2824451
[0068] [50] a nucleotide sequence of nucleotides 2829399 to 2909409
[0069] [51] a nucleotide sequence of nucleotides 2909710 to 2921193
[0070] [52] a nucleotide sequence of nucleotides 2943639 to 2984497
[0071] [53] a nucleotide sequence of nucleotides 3032267 to 3076223
[0072] [54] a nucleotide sequence of nucleotides 3078056 to 3109245
[0073] [55] a nucleotide sequence of nucleotides 3133480 to 3164769
[0074] [56] a nucleotide sequence of nucleotides 3172082 to 3184621
[0075] [57] a nucleotide sequence of nucleotides 3186056 to 3224889
[0076] [58] a nucleotide sequence of nucleotides 3240401 to 3261074
[0077] [59] a nucleotide sequence of nucleotides 3262220 to 3361080
[0078] [60] a nucleotide sequence of nucleotides 3370892 to 3411501
[0079] [61] a nucleotide sequence of nucleotides 3421222 to 3486426
[0080] [62] a nucleotide sequence of nucleotides 3496906 to 3536155
[0081] [63] a nucleotide sequence of nucleotides 3549687 to 3556477
[0082] [64] a nucleotide sequence of nucleotides 3576239 to 3697304
[0083] [65] a nucleotide sequence of nucleotides 3709527 to 3742812
[0084] [66] a nucleotide sequence of nucleotides 3744293 to 3748980
[0085] [67] a nucleotide sequence of nucleotides 3747997 to 3750486
[0086] [68] a nucleotide sequence of nucleotides 3751906 to 3762908
[0087] [69] a nucleotide sequence of nucleotides 3772817 to 3774086
[0088] [70] a nucleotide sequence of nucleotides 3785257 to 3794687
[0089] [71] a nucleotide sequence of nucleotides 3803459 to 3868134
[0090] [72] a nucleotide sequence of nucleotides 3878460 to 3918087
[0091] [73] a nucleotide sequence of nucleotides 3919815 to 3986454
[0092] [74] a nucleotide sequence of nucleotides 3988342 to 4003004
[0093] [75] a nucleotide sequence of nucleotides 4021347 to 4055371
[0094] [76] a nucleotide sequence of nucleotides 4061466 to 4128290
[0095] [77] a nucleotide sequence of nucleotides 4141016 to 4170562
[0096] [78] a nucleotide sequence of nucleotides 4186909 to 4239493
[0097] [79] a nucleotide sequence of nucleotides 4255871 to 4303000
[0098] [80] a nucleotide sequence of nucleotides 4316735 to 4318540
[0099] [81] a nucleotide sequence of nucleotides 4334946 to 4414758
[0100] [82] a nucleotide sequence of nucleotides 4428378 to 4501437
[0101] [83] a nucleotide sequence of nucleotides 4604873 to 4646332.
[0102] (3) The E. coli mutant strain according to (1) or (2) comprising chromosomal DNA that does not comprise uspG gene, ybdR gene, rnk gene, rna gene, citT gene, citG gene, citX gene, citF gene, citE gene, citD gene, citC gene, citA gene, citB gene, dcuC gene, crcA gene, cspE gene, crcB gene, ybeH gene, and ybeM gene, or homologous gene thereof.
[0103] (4) The E. coli mutant strain according to any one of (1) to (3) comprising chromosomal DNA that does not comprise DNA having a nucleotide sequence of nucleotides 640669 to 659192 in the nucleotide sequence as shown in SEQ ID NO: 1 or DNA equivalent thereto.
[0104] (5) The E. coli mutant strain according to any one of (1) to (4) comprising chromosomal DNA that does not comprise yqcA gene, yqcB gene, yqcC gene, syd gene, yqcD gene, ygdH gene, sdaC gene, sdaB gene, exo gene, fucO gene, fucA gene, fucP gene, fucI gene, fucK gene, fucU gene, fucR gene, ygdE gene, ygdD gene, gcvA gene, ygdI gene, csdA gene, and ygdK gene, or homologous gene thereof and comprise chpA gene, or homologous gene thereof.
[0105] (6) The E. coli mutant strain according to any one of (1) to (5) comprising chromosomal DNA that does not comprise DNA having a nucleotide sequence of nucleotides 2921194 to 2943638 in the nucleotide sequence as shown in SEQ ID NO: 1 or DNA equivalent thereto.
[0106] (7) The E. coli mutant strain according to any one of (1) to (6) comprising chromosomal DNA that does not comprise araD gene, araA gene, araB gene, araC gene, yabI gene, thiQ gene, thiP gene, tbpA gene, sgrR gene, and setA gene, or homologous gene thereof.
[0107] (8) The E. coli mutant strain according to any one of (1) to (7) comprising chromosomal DNA that does not comprise DNA having a nucleotide sequences of nucleotides 65858 to 78796 in the nucleotide sequence as shown in SEQ ID NO: 1 or DNA equivalent thereto.
[0108] (9) The E. coli mutant strain according to any one of (1) to (8) comprising chromosomal DNA that does not comprise yhfZ gene, yhfY gene, yhfX gene, yhfW gene, php gene, yhfU gene, yhfT gene, yhfS gene, frlR gene, frlD gene, frlC gene, frlB gene, frlA gene, and yhfL gene, or homologous gene thereof.
[0109] (10) The E. coli mutant strain according to any one of (1) to (9) comprising chromosomal DNA that does not comprise DNA having a nucleotide sequence of nucleotides 4128291 to 4141015 in the nucleotide sequence as shown in SEQ ID NO: 1 or DNA equivalent thereto.
[0110] (11) The E. coli mutant strain according to any one of (1) to (10) comprising chromosomal DNA that does not comprise pncA gene, ydjE gene, ydjF gene, ydjG gene, ydjH gene, ydjI gene, ydjJ gene, ydjK gene, ydjL gene, yeaC gene, and yeaA gene, or homologous gene thereof.
[0111] (12) The E. coli mutant strain according to any one of (1) to (11) comprising chromosomal DNA that does not comprise DNA having a nucleotide sequence of nucleotides 1853605 to 1864143 in the nucleotide sequence as shown in SEQ ID NO: 1 or DNA equivalent thereto.
[0112] (13) The E. coli mutant strain according to any one of (1) to (12) comprising chromosomal DNA that does not comprise ade gene, yicO gene, yicN gene, yicM gene, yicS gene, nlpA gene, yicL gene, and setC gene, or homologous gene thereof.
[0113] (14) The E. coli mutant strain according to any one of (1) to (13) comprising chromosomal DNA that does not comprise DNA having a nucleotide sequence of nucleotides 3794688 to 3803458 in the nucleotide sequence as shown in SEQ ID NO: 1 or DNA equivalent thereto.
[0114] (15) The E. coli mutant strain according to any one of (1) to (14) comprising chromosomal DNA that does not comprise ygjI gene, ygjJ gene, ygjK gene, fadH gene, ygjM gene, ygjN gene, ygjO gene, ygjP gene, ygjQ gene, ygjR gene, alx gene, sstT gene, and ygjV gene, or homologous gene thereof.
[0115] (16) The E. coli mutant strain according to any one of (1) to (15) comprising chromosomal DNA that does not comprise DNA having a nucleotide sequence of nucleotides 3224890 to 3240400 in the nucleotide sequence as shown in SEQ ID NO: 1 or DNA equivalent thereto.
[0116] (17) The E. coli mutant strain according to any one of (1) to (16) comprising chromosomal DNA that does not comprise yrhB gene, yrhA gene, yhhZ gene, yhhY gene, yhhX gene, and yhhW gene, or homologous gene thereof.
[0117] (18) The E. coli mutant strain according to any one of (1) to (17) comprising chromosomal DNA that does not comprise DNA having a nucleotide sequence of nucleotides 4055372 to 4061465 in the nucleotide sequence as shown in SEQ ID NO: 1 or DNA equivalent thereto.
[0118] (19) The E. coli mutant strain according to any one of (1) to (18) comprising chromosomal DNA that does not comprise yeaK gene, yoaI gene, yeaL gene, yeaM gene, yeaN gene, yeaO gene, yoaF gene, yeaP gene, yeaQ gene, yoaG gene, yeaR gene, yeaS gene, yeaT gene, yeaU gene, yeaV gene, yeaW gene, and yeaX gene, or homologous gene thereof.
[0119] (20) The E. coli mutant strain according to any one of (1) to (19) comprising chromosomal DNA that does not comprise DNA having a nucleotide sequence of nucleotides 1875288 to 1888499 in the nucleotide sequence as shown in SEQ ID NO: 1 or DNA equivalent thereto.
[0120] (21) The E. coli mutant strain according to any one of (1) to (20) comprising chromosomal DNA that does not comprise hyfA gene, hyfB gene, hyfC gene, hyfD gene, hyfE gene, hyfF gene, hyfG gene, hyfH gene, hyfI gene, hyfJ gene, hyfR gene, and focB gene, or homologous gene thereof.
[0121] (22) The E. coli mutant strain according to any one of (1) to (21) comprising chromosomal DNA that does not comprise DNA having a nucleotide sequence of nucleotides 2599857 to 2613438 in the nucleotide sequence as shown in SEQ ID NO: 1 or DNA equivalent thereto.
[0122] (23) An E. coli mutant strain comprising chromosomal DNA comprising the following genes [1] or homologous genes thereof, comprising not more than 10% of the genes [2] and [3] or homologous genes thereof, and being at least 1040 kbp shorter than that of a wild-type E. coli strain, provided that when the following genes [1] or homologous genes thereof comprise NC genes, the aforementioned E. coli mutant strain derived from the wild-type E. coli strain does not necessarily have the NC gene.
[0123] [1] thrL gene, thrA gene, thrB gene, thrC gene, talB gene, mog gene, htgA gene, dnaK gene, dnaJ gene, mokC gene, hokC gene, sokC gene, nhaA gene, nhaR gene, rpsT gene, ribF gene, ileS gene, lspA gene, fkpB gene, ispH gene, rihC gene, dapB gene, carA gene, carB gene, caiF gene, caiE gene, caiD gene, caiC gene, caiB gene, caiA gene, caiT gene, fixA gene, fixB gene, fixC gene, fixX gene, kefF gene, kefC gene, folA gene, apaH gene, apaG gene, ksgA gene, pdxA gene, surA gene, imp gene, djlA gene, rluA gene, hepA gene, polB gene, leuD gene, leuC gene, leuB gene, leuA gene, leuL gene, leuO gene, ilvI gene, ilvH gene, fruR gene, mraZ gene, mraW gene, ftsL gene, ftsI gene, murE gene, murF gene, mraY gene, murD gene, ftsW gene, murG gene, murC gene, ddlB gene, ftsQ gene, ftsA gene, ftsZ gene, lpxC gene, secM gene, secA gene, mutT gene, coaE gene, guaC gene, hofC gene, hofB gene, ppdD gene, nadC gene, ampD gene, ampE gene, aroP gene, pdhR gene, aceE gene, aceF gene, lpd gene, acnB gene, speD gene, speE gene, cueO gene, gcd gene, hpt gene, can gene, panD gene, panC gene, panB gene, htrE gene, ecpD gene, folK gene, pcnB gene, dksA gene, sfsA gene, ligT gene, hrpB gene, mrcB gene, hemL gene, cicA gene, btuF gene, pfs gene, dgt gene, degP gene, cdaR gene, dapD gene, glnD gene, map gene, tff gene, rpsB gene, tsf gene, pyrH gene, frr gene, dxr gene, ispU gene, cdsA gene, hlpA gene, lpxD gene, fabZ gene, lpxA gene, lpxB gene, rnhB gene, dnaE gene, accA gene, ldcC gene, tilS gene, rof gene, nlpE gene, proS gene, rcsF gene, metQ gene, metI gene, metN gene, gmhB gene, rrsH gene, ileV gene, alaV gene, rrlH gene, rrfH gene, aspU gene, dkgB gene, mitD gene, gloB gene, rnhA gene, dnaQ gene, aspV gene, ivy gene, fadE gene, lpcA gene, pepD gene, gpt gene, frsA gene, crl gene, phoE gene, proB gene, proA gene, thrW gene, hemB gene, proC gene, aroL gene, aroM gene, rdgC gene, mak gene, araJ gene, sbcC gene, sbcD gene, phoB gene, phoR gene, brnQ gene, proY gene, malZ gene, queA gene, tgt gene, secD gene, secF gene, tsx gene, ribD gene, ribE gene, nusB gene, thiL gene, pgpA gene, dxs gene, ispA gene, xseB gene, thiI gene, panE gene, cyoE gene, cyoD gene, cyoC gene, cyoB gene, cyoA gene, ampG gene, bolA gene, tig gene, clpP gene, clpX gene, lon gene, hupB gene, ppiD gene, cof gene, mdlA gene, mdlB gene, glnK gene, amtB gene, tesB gene, ffs gene, maa gene, hha gene, acrB gene, acrA gene, acrR gene, kefA gene, priC gene, apt gene, dnaX gene, recR gene, htpG gene, adk gene, hemH gene, aes gene, gsk gene, fsr gene, ushA gene, copA gene, cueR gene, gcl gene, hyi gene, purK gene, purE gene, lpxH gene, ppiB gene, cysS gene, folD gene, sfmA gene, sfmC gene, sfmD gene, sfmH gene, sfmF gene, fimZ gene, argU gene, entD gene, fepA gene, fes gene, entF gene, fepE gene, fepC gene, fepG gene, fepD gene, fepB gene, entC gene, entE gene, entB gene, entA gene, cstA gene, dsbG gene, ahpC gene, ahpF gene, tatE gene, lipA gene, lipB gene, dacA gene, ripA gene, mrdB gene, mrdA gene, cobC gene, nadD gene, holA gene, rlpB gene, leuS gene, lnt gene, miaB gene, ubiF gene, glnX gene, glnV gene, metU gene, glnW gene, glnU gene, leuW gene, metT gene, asnB gene, nagD gene, nagC gene, nagA gene, nagB gene, nagE gene, glnS gene, fur gene, fldA gene, seqA gene, pgm gene, potE gene, speF gene, kdpE gene, kdpD gene, kdpC gene, kdpB gene, kdpA gene, nei gene, abrB gene, gitA gene, sdhC gene, sdhD gene, sdhA gene, sdhB gene, sucA gene, sucB gene, sucC gene, sucD gene, mngR gene, mngA gene, mngB gene, cydA gene, cydB gene, tolQ gene, tolR gene, tolA gene, tolB gene, pal gene, lysT gene, valT gene, lysW gene, valZ gene, lysY gene, lysZ gene, lysQ gene, nadA gene, pnuC gene, zitB gene, aroG gene, gpmA gene, galM gene, galK gene, galT gene, galE gene, modF gene, modE gene, modA gene, modB gene, modC gene, bioA gene, bioB gene, bioF gene, bioC gene, bioD gene, uvrB gene, moaA gene, moaB gene, moaC gene, moaD gene, moaE gene, rhlE gene, dps gene, rhtA gene, ompX gene, rybA gene, mntR gene, fsaA gene, moeB gene, moeA gene, iaaA gene, cmr gene, rybB gene, grxA gene, poxB gene, her gene, hcp gene, aqpZ gene, macA gene, macB gene, cspD gene, clpS gene, clpA gene, serW gene, infA gene, aat gene, cydC gene, cydD gene, trxB gene, lrp gene, ftsK gene, lolA gene, serS gene, dmsA gene, dmsB gene, dmsC gene, pflA gene, pflB gene, focA gene, serC gene, aroA gene, cmk gene, rpsA gene, ihfB gene, msbA gene, lpxK gene, kdsB gene, smtA gene, mukF gene, mukE gene, mukB gene, aspC gene, ompF gene, asnS gene, pncB gene, pepN gene, ssuB gene, ssuC gene, ssuD gene, ssuA gene, ssuE gene, pyrD gene, uup gene, pqiA gene, pqiB gene, rmf gene, fabA gene, ompA gene, sulA gene, helD gene, mgsA gene, serT gene, hyaA gene, hyaB gene, hyaC gene, hyaD gene, hyaE gene, hyaF gene, appC gene, appB gene, appA gene, etp gene, serX gene, csgG gene, csgF gene, csgE gene, csgD gene, csgB gene, csgA gene, csgC gene, mdoC gene, mdoG gene, mdoH gene, msyB gene, mdtG gene, lpxL gene, solA gene, dinI gene, pyrC gene, grxB gene, mdtH gene, rimJ gene, mviM gene, mviN gene, flgN gene, flgM gene, flgA gene, flgB gene, flgC gene, flgD gene, flgE gene, flgF gene, flgG gene, flgH gene, flgI gene, flgJ gene, flgK gene, flgL gene, rne gene, rluC gene, sraB gene, rpmF gene, plsX gene, fabH gene, fabD gene, fabG gene, acpP gene, fabF gene, pabC gene, tmk gene, holB gene, ptsG gene, fhuE gene, hinT gene, nagZ gene, ndh gene, mfd gene, lolC gene, lolD gene, lolE gene, cobB gene, potD gene, potC gene, potB gene, potA gene, pepT gene, phoQ gene, phoP gene, purB gene, hflD gene, trmU gene, minE gene, minD gene, minC gene, hlyE gene, umuD gene, umuC gene, dsbB gene, nhaB gene, fadR gene, dadA gene, dadX gene, cvrA gene, ldcA gene, emtA gene, treA gene, dhaH gene, dhaL gene, dhaK gene, dhaR gene, pth gene, prsA gene, ispE gene, lolB gene, hemA gene, prfA gene, prmC gene, kdsA gene, ldrA gene, rdlA gene, ldrB gene, rdlB gene, ldrC gene, rdlC gene, chaA gene, chaB gene, chaC gene, narL gene, narX gene, narK gene, narG gene, narH gene, narJ gene, narI gene, rttR gene, tpr gene, tyrV gene, tyrT gene, purU gene, rssA gene, rssB gene, galU gene, has gene, tdk gene, adhE gene, oppA gene, oppB gene, oppC gene, oppD gene, oppF gene, cls gene, kch gene, tonB gene, ompW gene, trpA gene, trpB gene, trpC gene, trpD gene, trpE gene, trpL gene, rluB gene, btuR gene, sohB gene, topA gene, cysB gene, acnA gene, ribA gene, pgpB gene, pyrF gene, osmB gene, gmr gene, rnb gene, fabI gene, sapF gene, sapD gene, sapC gene, sapB gene, sapA gene, puuP gene, puuA gene, puuD gene, puuR gene, puuC gene, puuB gene, puuE gene, pspF gene, pspA gene, pspB gene, pspC gene, pspD gene, pspE gene, ompG gene, tyrR gene, tpx gene, mpaA gene, mppA gene, uspE gene, fnr gene, ogt gene, abgT gene, abgB gene, abgA gene, abgR gene, isrA gene, dbpA gene, uspF gene, ompN gene, micC gene, hslJ gene, ldhA gene, feaR gene, feaB gene, tynA gene, maoC gene, paaA gene, paaB gene, paaC gene, paaD gene, paaE gene, paaF gene, paaG gene, paaH gene, paaI gene, paaJ gene, paaK gene, paaX gene, paaY gene, azoR gene, hrpA gene, aldA gene, gapC_{—}2 gene, gapC_{—}1 gene, cybB gene, hokB gene, mokB gene, sokB gene, trg gene, mdoD gene, rimL gene, tehA gene, tehB gene, ansP gene, nhoA gene, narV gene, narW gene, narY gene, narZ gene, narU gene, fdnG gene, fdnH gene, fdnI gene, adhP gene, sfcA gene, sra gene, bdm gene, osmC gene, ddpF gene, ddpD gene, ddpC gene, ddpB gene, ddpA gene, ddpX gene, dos gene, gadC gene, gadB gene, pqqL gene, hipA gene, hipB gene, ego gene, lsrC gene, lsrD gene, lsrB gene, lsrF gene, lsrG gene, tam gene, uxaB gene, marC gene, marR gene, marA gene, marB gene, eamA gene, dcp gene, rspB gene, rspA gene, speG gene, dmsD gene, cicB gene, dgsA gene, asr gene, mdtI gene, mdtJ gene, pntB gene, pntA gene, folM gene, rstA gene, rstB gene, tus gene, fumC gene, fumA gene, manA gene, uidC gene, uidB gene, uidA gene, uidR gene, hdhA gene, malI gene, malX gene, malY gene, add gene, blr gene, rsxA gene, rsxB gene, rsxC gene, rsxD gene, rsxG gene, rsxE gene, nth gene, gst gene, pdxY gene, tyrS gene, pdxH gene, slyB gene, slyA gene, sodC gene, nemA gene, gloA gene, rnt gene, lhr gene, sodB gene, purR gene, cfa gene, ribC gene, mdtK gene, valV gene, valW gene, pykF gene, lpp gene, sufE gene, sufS gene, sufD gene, sufC gene, sufB gene, sufA gene, rydB gene, rprA gene, aroD gene, pps gene, aroH gene, nlpC gene, btuD gene, btuE gene, btuC gene, ihfA gene, pheT gene, pheS gene, pheM gene, rplT gene, rpmI gene, infC gene, thrS gene, arpB_{—}1 gene, arpB_{—}2 gene, pfkB gene, cedA gene, katE gene, chbG gene, chbF gene, chbR gene, chbA gene, chbC gene, chbB gene, osmE gene, nadE gene, spy gene, astE gene, astB gene, astD gene, astA gene, astC gene, xthA gene, nudG gene, gdhA gene, topB gene, selD gene, sppA gene, ansA gene, gapA gene, mipA gene, rnd gene, fadD gene, pabB gene, sdaA gene, manX gene, manY gene, manZ gene, rrmA gene, cspC gene, kdgR gene, htpX gene, prc gene, proQ gene, pphA gene, ryeA gene, ryeB gene, holE gene, exoX gene, ptrB gene, purT gene, eda gene, edd gene, zwf gene, pykA gene, lpxM gene, znuA gene, znuC gene, znuB gene, ruvB gene, ruvA gene, ruvC gene, nudB gene, aspS gene, torZ gene, torY gene, cutC gene, argS gene, leuZ gene, cysT gene, glyW gene, pgsA gene, dsrA gene, serU gene, asnT gene, shiA gene, amn gene, asnW gene, asnU gene, cbl gene, nac gene, asnV gene, erfK gene, cobT gene, cobS gene, cobU gene, sbmC gene, dacD gene, sbcB gene, hisL gene, hisG gene, hisD gene, hisC gene, hisB gene, hisH gene, hisA gene, hisF gene, hisI gene, cld gene, ugd gene, gnd gene, galF gene, wcaM gene, wcaL gene, wcaK gene, wzxC gene, wcaJ gene, cpsG gene, cpsB gene, wcaI gene, nudD gene, fcl gene, gmd gene, wcaF gene, wcaE gene, wcaD gene, wcaC gene, wcaB gene, wcaA gene, wzc gene, wzb gene, wza gene, asmA gene, dcd gene, udk gene, thiD gene, thiM gene, mrp gene, metG gene, dusC gene, cdd gene, sanA gene, mglC gene, mglA gene, mglB gene, galS gene, folE gene, cirA gene, lysP gene, nfo gene, fruA gene, fruK gene, fruB gene, setB gene, spr gene, rtn gene, bcr gene, rsuA gene, rplY gene, proL gene, narP gene, ccmH gene, ccmG gene, ccmF gene, ccmE gene, ccmD gene, ccmC gene, ccmB gene, ccmA gene, napC gene, napB gene, napH gene, napG gene, napA gene, napD gene, napF gene, eco gene, mqo gene, alkB gene, ada gene, ompC gene, micF gene, rcsD gene, rcsB gene, rcsC gene, atoS gene, atoC gene, atoD gene, atoA gene, atoE gene, atoB gene, gyrA gene, ubiG gene, nrdA gene, nrdB gene, inaA gene, glpQ gene, glpT gene, glpA gene, glpB gene, glpC gene, ais gene, arnT gene, pmrD gene, menE gene, menC gene, menB gene, menD gene, menF gene, nuoN gene, nuoM gene, nuoL gene, nuoK gene, nuoJ gene, nuoI gene, nuoH gene, nuoG gene, nuoF gene, nuoE gene, nuoC gene, nuoB gene, nuoA gene, lrhA gene, ackA gene, pta gene, ubiX gene, purF gene, cvpA gene, dedD gene, folC gene, accD gene, dedA gene, truA gene, usg gene, pdxB gene, flk gene, fabB gene, trmC gene, mepA gene, aroC gene, prmB gene, sixA gene, fadL gene, vacJ gene, argW gene, dsdC gene, dsdX gene, dsdA gene, emrY gene, emrK gene, evgA gene, evgS gene, oxc gene, frc gene, ddg gene, glk gene, mntH gene, nupC gene, alaX gene, alaW gene, gltX gene, valU gene, valX gene, valY gene, lysV gene, xapR gene, xapB gene, xapA gene, ligA gene, zipA gene, cysZ gene, cysK gene, ptsH gene, ptsI gene, crr gene, pdxK gene, cysM gene, cysA gene, cysW gene, cysU gene, cysP gene, ucpA gene, murP gene, amiA gene, hemF gene, eutL gene, eutC gene, eutB gene, eutA gene, eutH gene, eutG gene, eutJ gene, eutE gene, cchB gene, cchA gene, eutI gene, eutT gene, eutQ gene, eutP gene, maeB gene, talA gene, tktB gene, aegA gene, narQ gene, acrD gene, dapE gene, purC gene, nlpB gene, dapA gene, gcvR gene, bcp gene, hda gene, uraA gene, upp gene, purM gene, purN gene, ppk gene, ppx gene, guaA gene, guaB gene, xseA gene, der gene, hisS gene, ispG gene, ndk gene, pbpC gene, sseA gene, ryfA gene, sseB gene, pepB gene, fdx gene, hscA gene, hscB gene, iscA gene, iscU gene, iscS gene, iscR gene, suhB gene, csiE gene, hcaT gene, hcaR gene, hcaE gene, hcaF gene, hcaC gene, hcaB gene, hcaD gene, glyA gene, hmp gene, glnB gene, sroF gene, purL gene, tadA gene, acpS gene, pdxJ gene, recO gene, era gene, rnc gene, lepB gene, lepA gene, rseC gene, rseB gene, rseA gene, rpoE gene, nadB gene, srmB gene, ung gene, trxC gene, pssA gene, kgtP gene, rrfG gene, rrlG gene, gltW gene, rrsG gene, clpB gene, rluD gene, pheL gene, pheA gene, tyrA gene, aroF gene, rplS gene, trmD gene, rimM gene, rpsP gene, ffh gene, grpE gene, recN gene, smpA gene, smpB gene, ssrA gene, gabD gene, gabT gene, gabP gene, nrdF gene, mprA gene, emrA gene, emrB gene, luxS gene, sraD gene, gshA gene, argQ gene, argZ gene, argY gene, argV gene, serV gene, csrA gene, alaS gene, recX gene, recA gene, mltB gene, norR gene, norV gene, norW gene, hypF gene, hydN gene, ascG gene, ascF gene, ascB gene, hycI gene, hycH gene, hycG gene, hycF gene, hycE gene, hycD gene, hycC gene, hycB gene, hycA gene, hypA gene, hypB gene, hypC gene, hypD gene, hypE gene, fhlA gene, mutS gene, pphB gene, rpoS gene, nlpD gene, pcm gene, surE gene, truD gene, ispF gene, ispD gene, ftsB gene, cysC gene, cysN gene, cysD gene, iap gene, cysH gene, cysI gene, cysJ gene, eno gene, pyrG gene, mazG gene, chpR gene, relA gene, rumA gene, barA gene, gudD gene, gudX gene, gudP gene, mltA gene, metZ gene, metW gene, metV gene, amiC gene, argA gene, recD gene, recB gene, ptr gene, recC gene, ppdC gene, ppdB gene, ppdA gene, thyA gene, lgt gene, ptsP gene, nudH gene, mutH gene, tas gene, aas gene, rygA gene, rygB gene, galR gene, lysA gene, lysR gene, araE gene, kduD gene, kduI gene, lysS gene, prfB gene, recJ gene, dsbC gene, xerD gene, fldB gene, bglA gene, gcvP gene, gcvH gene, gcvT gene, visC gene, ubiH gene, pepP gene, zapA gene, ssrS gene, rygC gene, serA gene, rpiA gene, argP gene, argK gene, argO gene, mscS gene, fbaA gene, pgk gene, epd gene, tktA gene, speB gene, speA gene, metK gene, galP gene, sprT gene, endA gene, gshB gene, ansB gene, mutY gene, mltC gene, nupG gene, speC gene, pheV gene, pitB gene, gss gene, hybG gene, hybF gene, hybE gene, hybD gene, hybC gene, hybB gene, hybA gene, hybO gene, exbD gene, exbB gene, metC gene, dkgA gene, sufI gene, plsC gene, parC gene, parE gene, cpdA gene, nudF gene, tolC gene, zupT gene, ribB gene, glgS gene, rygD gene, rfaE gene, ginE gene, htrG gene, cca gene, bacA gene, folB gene, ttdA gene, ttdB gene, rpsU gene, dnaG gene, rpoD gene, ileX gene, aer gene, ebgR gene, ebgA gene, ebgC gene, uxaA gene, uxaC gene, exuT gene, exuR gene, tdcG gene, tdcF gene, tdcE gene, tdcD gene, tdcC gene, tdcB gene, tdcA gene, tdcR gene, rnpB gene, garK gene, garR gene, garL gene, garP gene, garD gene, sohA gene, agaR gene, kbaZ gene, agaV gene, agaW gene, agaA gene, agaS gene, kbaY gene, agaB gene, agaC gene, agaD gene, agaI gene, mtr gene, deaD gene, nlpI gene, pnp gene, sraG gene, rpsO gene, truB gene, rbfA gene, infB gene, nusA gene, metY gene, argG gene, leuU gene, secG gene, glmM gene, folP gene, ftsH gene, rrmJ gene, greA gene, dacB gene, obgE gene, rpmA gene, rplU gene, ispB gene, sfsB gene, murA gene, kdsD gene, kdsC gene, rpoN gene, ptsN gene, npr gene, mtgA gene, elbB gene, ryhA gene, arcB gene, gltB gene, gltD gene, nanT gene, nanA gene, nanR gene, dcuD gene, sspB gene, sspA gene, rpsI gene, rplM gene, degQ gene, degS gene, mdh gene, argR gene, aaeB gene, aaeA gene, aaeX gene, aaeR gene, tldD gene, rng gene, mreD gene, mreC gene, mreB gene, accB gene, accC gene, panF gene, prmA gene, dusB gene, fis gene, rrfF gene, thrV gene, rrfD gene, rrlD gene, gltV gene, rrsD gene, purH gene, purD gene, zraR gene, zraS gene, zraP gene, hupA gene, nfi gene, hemE gene, nudC gene, rsd gene, thiC gene, thiE gene, thiF gene, thiS gene, thiG gene, thiH gene, htrC gene, rpoC gene, rpoB gene, rplL gene, rplJ gene, rplA gene, rplK gene, nusG gene, secE gene, tufB gene, thrT gene, glyT gene, tyrU gene, thrU gene, coaA gene, birA gene, murB gene, rrfB gene, rrlB gene, gltT gene, rrsB gene, murI gene, btuB gene, trmA gene, fabR gene, sthA gene, oxyR gene, oxyS gene, argH gene, argB gene, argC gene, argE gene, ppc gene, fsaB gene, gldA gene, katG gene, metF gene, metL gene, metB gene, metJ gene, rpmE gene, priA gene, cytR gene, ftsN gene, hslV gene, hslU gene, menA gene, rraA gene, glpF gene, glpK gene, glpX gene, fpr gene, tpiA gene, cdh gene, sbp gene, pfkA gene, fieF gene, cpxP gene, cpxR gene, cpxA gene, kdgT gene, sodA gene, fdhD gene, fdoG gene, fdoH gene, fdoI gene, fdhE gene, bipA gene, glnA gene, glnL gene, glnG gene, hemN gene, csrC gene, spf gene, polA gene, dsbA gene, mobA gene, mobB gene, rrfA gene, rrlA gene, alaT gene, ileT gene, rrsA gene, hemG gene, trkH gene, pepQ gene, fadB gene, fadA gene, fre gene, ubiD gene, rfaH gene, tatD gene, tatC gene, tatB gene, tatA gene, ubiB gene, ubiE gene, rmuC gene, udp gene, metE gene, metR gene, pldB gene, rhtB gene, rhtC gene, recQ gene, pldA gene, rarD gene, corA gene, uvrD gene, xerC gene, dapF gene, cyaY gene, cyaA gene, hemC gene, hemD gene, hemX gene, hemY gene, ryiA gene, aslA gene, aslB gene, proM gene, leuT gene, hisR gene, argX gene, rffM gene, wzyE gene, rffT gene, wzxE gene, rffA gene, rffC gene, rffH gene, rffG gene, rffD gene, rffE gene, wzzE gene, rfe gene, rho gene, rhoL gene, trxA gene, rhlB gene, gpp gene, rep gene, ppiC gene, ilvC gene, ilvY gene, ilvA gene, ilvD gene, ilvE gene, ilvM gene, ilvG_{—}2 gene, ilvG_{—}1 gene, ilvL gene, hdfR gene, trpT gene, aspT gene, rrfC gene, rrlC gene, gltU gene, rrsC gene, asnC gene, mioC gene, oriC gene, gidA gene, gidB gene, atpI gene, atpB gene, atpE gene, atpF gene, atpH gene, atpA gene, atpG gene, atpD gene, atpC gene, glmU gene, glmS gene, pstS gene, pstC gene, pstA gene, pstB gene, phoU gene, bglG gene, bglF gene, bglB gene, bglH gene, cbrC gene, mdtL gene, tnaB gene, tnaA gene, tnaC gene, trmE gene, rnpA gene, rpmH gene, dnaA gene, dnaN gene, recF gene, gyrB gene, ibpA gene, ibpB gene, emrD gene, ivbL gene, ilvB gene, ilvN gene, uhpA gene, uhpB gene, uhpC gene, uhpT gene, selC gene, gltS gene, recG gene, trmH gene, spoT gene, rpoZ gene, gmk gene, ligB gene, dinD gene, rph gene, pyrE gene, ttk gene, dut gene, dfp gene, rpmB gene, rpmG gene, mutM gene, coaD gene, kdtA gene, rfaQ gene, rfaG gene, rfaP gene, rfaS gene, rfaB gene, rfaI gene, rfaJ gene, rfaY gene, rfaZ gene, rfaK gene, rfaL gene, rfaC gene, rfaF gene, rfaD gene, htrL gene, kbl gene, tdh gene, envC gene, gpmI gene, grxC gene, secB gene, gpsA gene, cysE gene, lldD gene, lldR gene, lldP gene, mtlR gene, mtlD gene, mtlA gene, selA gene, selB gene, aldB gene, sgbE gene, sgbU gene, sgbH gene, lyxK gene, avtA gene, malS gene, bax gene, xylR gene, xylH gene, xylG gene, xylF gene, xylA gene, xylB gene, glyQ gene, glyS gene, hokA gene, cspA gene, tiaE gene, bisC gene, tag gene, eptB gene, proK gene, dppA gene, dppB gene, dppC gene, dppD gene, dppF gene, rdlD gene, ldrD gene, bcsG gene, bcsF gene, bcsE gene, bcsA gene, bcsB gene, bcsZ gene, bcsC gene, dctA gene, kdgK gene, treF gene, gadA gene, gadX gene, gadY gene, gadW gene, mdtF gene, mdtE gene, gadE gene, hdeD gene, hdeA gene, hdeB gene, slp gene, arsC gene, arsB gene, arsR gene, gor gene, prlC gene, uspA gene, pitA gene, nikR gene, nikE gene, nikD gene, nikC gene, nikB gene, nikA gene, acpT gene, dcrB gene, zntA gene, ftsY gene, ftsE gene, ftsX gene, rpoH gene, livJ gene, livK gene, livH gene, livM gene, livG gene, livF gene, ugpB gene, ugpA gene, ugpE gene, ugpC gene, ugpQ gene, ggt gene, gntR gene, gntK gene, gntU gene, asd gene, glgB gene, glgX gene, glgC gene, glgA gene, glgP gene, glpD gene, glpE gene, glpG gene, glpR gene, rtcR gene, rtcB gene, rtcA gene, malT gene, malP gene, malQ gene, gntT gene, gntY gene, gntX gene, bioH gene, feoB gene, feoA gene, greB gene, ompR gene, envZ gene, pck gene, hslO gene, hslR gene, nudE gene, mrcA gene, hofQ gene, aroK gene, aroB gene, damX gene, dam gene, rpe gene, gph gene, trpS gene, cysG gene, nirC gene, nirD gene, nirB gene, tsgA gene, ppiA gene, fic gene, pabA gene, argD gene, crp gene, prkB gene, kefG gene, kefB gene, slyD gene, slyX gene, fkpA gene, rpsL gene, rpsG gene, fusA gene, tufA gene, rpsJ gene, rplC gene, rplD gene, rplW gene, rplB gene, rpsS gene, rplV gene, rpsC gene, rplP gene, rpmC gene, rpsQ gene, rplN gene, rplX gene, rplE gene, rpsN gene, rpsH gene, rplF gene, rplR gene, rpsE gene, rpmD gene, rplO gene, secY gene, rpmJ gene, rpsM gene, rpsK gene, rpsD gene, rpoA gene, rplQ gene, zntR gene, mscL gene, trkA gene, rsmB gene, fmt gene, def gene, smf gene, smg gene, aroE gene, rrsE gene, ileU gene, alaU gene, rrlE gene, rrfE gene, metA gene, aceB gene, aceA gene, aceK gene, arpA gene, iclR gene, metH gene, pepE gene, lysC gene, pgi gene, ubiC gene, ubiA gene, plsB gene, dgkA gene, lexA gene, dinF gene, zur gene, qor gene, dnaB gene, alr gene, tyrB gene, aphA gene, uvrA gene, ssb gene, soxS gene, soxR gene, ryjA gene, actP gene, acs gene, nrfA gene, nrfB gene, nrfC gene, nrfD gene, nrfE gene, nrfF gene, nrfG gene, gltP gene, fdhF gene, rpiR gene, rpiB gene, proP gene, basS gene, basR gene, eptA gene, adiC gene, adiY gene, adiA gene, melR gene, melA gene, melB gene, fumB gene, dcuB gene, dcuR gene, dcuS gene, lysU gene, cadA gene, cadB gene, cadC gene, pheU gene, dipZ gene, cutA gene, dcuA gene, aspA gene, fxsA gene, groS gene, groL gene, efp gene, ecnA gene, ecnB gene, sugE gene, blc gene, ampC gene, frdD gene, frdC gene, frdB gene, frdA gene, poxA gene, psd gene, rsgA gene, orn gene, glyV gene, glyX gene, glyY gene, amiB gene, mutL gene, miaA gene, hfq gene, hflX gene, hflK gene, hflC gene, purA gene, rnr gene, rlmB gene, ulaF gene, rpsF gene, priB gene, rpsR gene, rplI gene, fklB gene, cycA gene, cpdB gene, cysQ gene, msrA gene, chpS gene, chpB gene, ppa gene, fbp gene, mpl gene, pmbA gene, cybC gene, nrdG gene, nrdD gene, treC gene, treB gene, treR gene, mgtA gene, pyrI gene, pyrB gene, pyrL gene, argI gene, valS gene, holC gene, pepA gene, idnR gene, idnT gene, idnO gene, idnD gene, idnK gene, leuX gene, dnaC gene, dnaT gene, bglJ gene, fhuF gene, leuV gene, leuP gene, leuQ gene, rsmC gene, holD gene, rimI gene, prfC gene, osmY gene, deoC gene, deoA gene, deoB gene, deoD gene, lplA gene, serB gene, radA gene, nadR gene, slt gene, trpR gene, rob gene, creA gene, creB gene, creC gene, creD gene, arcA gene
[0124] [2] fhuA gene, fhuC gene, fhuD gene, fhuB gene, yafJ gene, yafK gene, yafQ gene, dinJ gene, yafL gene, yafM gene, fhiA gene, mbhA gene, dinB gene, yafN gene, yafO gene, yafP gene, ykfJ gene, prfH gene, yagP gene, yagQ gene, yagR gene, yagS gene, yagT gene, yagU gene, ykgJ gene, yagV gene, yagW gene, yagX gene, yagY gene, yagZ gene, ykgK gene, ykgL gene, ykgM(JW5034) gene, ykgM(JW5035) gene, eaeH gene, ykgA gene, ykgB gene, ykgI gene, ykgC gene, ykgD gene, ykgE gene, ykgF gene, ykgG gene, ykgH gene, betA gene, betB gene, betI gene, betT gene, yahA gene, yahB gene, yahC gene, yahD gene, yahE gene, yahF gene, yahG gene, yahH gene, yahI gene, yahJ gene, yahK gene, yahL gene, yahM gene, yahN gene, yahO gene, prpR gene, prpB gene, prpC gene, prpD gene, prpE gene, codB gene, codA gene, cynR gene, cynT gene, cynS gene, cynX gene, lacA gene, lacY gene, lacZ gene, lad gene, mhpR gene, mhpA gene, mhpB gene, mhpC gene, mhpD gene, mhpF gene, mhpE gene, mhpT gene, yaiL gene, frmB gene, frmA gene, frmR gene, yaiO gene, yaiX gene, yaiF gene, yaiP gene, yaiS gene, tauA gene, tauB gene, tauC gene, tauD gene, yaiT gene, yaiU gene, yaiV gene, ampH gene, sbmA gene, yaiW gene, yaiY gene, yaiZ gene, ddlA gene, yaiB gene, phoA gene, psiF gene, yaiC gene, ybbO gene, tesA gene, ybbA gene, ybbP gene, ylbG gene, ybbB gene, ybbS gene, allA gene, allR gene, glxR gene, ybbV gene, ybbW gene, allB gene, ybbY gene, glxK gene, ylbA gene, allC gene, allD gene, fdrA gene, ylbE_{—}1 gene, ylbE_{—}2 gene, ylbF gene, ybcF gene, envY gene, ybcH gene, nfrA gene, nfrB gene, cusS gene, cusR gene, cusC gene, cusF gene, cusB gene, cusA gene, pheP gene, ybdG gene, nfnB gene, ybdF gene, ybdJ gene, ybdK gene, hokE gene, ybeL gene, ybeQ gene, ybeR gene, djlB gene, ybeT gene, ybeU gene, djlC gene, hscC gene, rihA gene, gltL gene, gltK gene, gltJ gene, gltI gene, kdpF gene, ybfA gene, ybgA gene, phr gene, ybiA gene, dinG gene, ybiB gene, ybiC gene, ybiJ gene, ybiI gene, ybiX gene, fiu gene, ybiM gene, ybiN gene, ybiO gene, glnQ gene, glnP gene, glnH gene, yliA gene, yliB gene, yliC gene, yliD gene, yliE gene, yliF gene, yliG gene, yliH gene, yliI gene, yliJ gene, dacC gene, deoR gene, ybjG gene, ybjC gene, nfsA gene, rimK gene, ybjN gene, potF gene, potG gene, potH gene, potI gene, ybjO gene, rumB gene, artJ gene, artM gene, artQ gene, artI gene, artP gene, ybjP gene, ybjQ gene, ybjR gene, ybjS gene, ybjT gene, ltaE gene, ymcC gene, ymcD gene, cspH gene, cspG gene, ymcE gene, gnsA gene, yccM gene, torS gene, torT gene, torR gene, torC gene, torA gene, torD gene, cbpM gene, cbpA gene, yccE gene, agp gene, yccJ gene, wrbA gene, ymdF gene, ycdG gene, ycdH gene, ycdI gene, rarA gene, ycdK gene, ycdL gene, ycdM gene, ycdC gene, putA gene, putP gene, ycdN_{—}1 gene, ycdN_{—}2 gene, ycdO gene, ycdB gene, phoH gene, ycdP gene, ycdQ gene, ycdR gene, ycdS gene, ycdT gene, ymdE gene, ycdU gene, elbA gene, ycgX gene, ycgE gene, ycgF gene, ycgZ gene, ymgA gene, ymgB gene, ymgC gene, ycgG gene, ymgF gene, ycgH_{—}1 gene, ycgH_{—}2 gene, ymgD gene, ymgG gene, ymgH gene, ycgI gene, ydfH gene, ydfZ gene, ydfI gene, ydfJ gene, yecT gene, flhE gene, flhA gene, flhB gene, cheZ gene, cheY gene, cheB gene, cheR gene, tap gene, tar gene, chew gene, cheA gene, motB gene, motA gene, flhC gene, flhD gene, yecG gene, otsA gene, otsB gene, araH gene, araG gene, araF gene, yecI gene, yecJ gene, isrB gene, yecR gene, ftn gene, yecH gene, tyrP gene, uvrC gene, uvrY gene, yecF gene, sdiA gene, yecC gene, yecS gene, yedO gene, fliY gene, fliZ gene, fliA gene, fliC gene, fliD gene, fliS gene, fliT gene, amyA gene, yedD gene, yedE gene, yedF gene, yedK gene, yedL gene, yedN_{—}2 gene, yedN_{—}1 gene, yedM gene, intG gene, fliE gene, fliF gene, fliG gene, fliH gene, fliI gene, fliJ gene, fliK gene, fliL gene, flits gene, fliN gene, fliO gene, fliP gene, fliQ gene, fliR gene, rcsA gene, dsrB gene, yodD gene, yedA gene, vsr gene, dcm gene, yedJ gene, yedR gene, yedS_{—}1 gene, yedS_{—}2 gene, yedS_{—}3 gene, hchA gene, yedV gene, yedW gene, yedX gene, yedY gene, yedZ gene, yodA gene, wbbL_{—}2 gene, wbbL_{—}1 gene, wbbK gene, wbbJ gene, wbbI gene, wbbH gene, glf gene, rfbX gene, rfbC gene, rfbA gene, rfbD gene, rfbB gene, yegE gene, alkA gene, yegD gene, yegI gene, yegJ gene, yegK gene, yegL gene, ryeC gene, ryeD gene, mdtA gene, mdtB gene, mdtC gene, mdtD gene, baeS gene, baeR gene, yegP gene, yegQ gene, ryeE gene, ogrK gene, yegZ gene, yegR gene, yegS gene, gatR_{—}1 gene, gatR_{—}2 gene, gatD gene, gatC gene, gatB gene, gatA gene, gatZ gene, gatY gene, fbaB gene, yegT gene, yegU gene, yegV gene, yegW gene, yegX gene, molR_{—}1 gene, molR_{—}2 gene, molR_{—}3 gene, yehI gene, yehK gene, yehL gene, yehM gene, yehP gene, yehQ gene, yehR gene, yehS gene, yehT gene, yehU gene, mlrA gene, yohO gene, yehW gene, yehX gene, yehY gene, yehZ gene, bglX gene, did gene, pbpG gene, yohC gene, yeiI gene, yeiJ gene, rihB gene, yeiL gene, yeiM gene, yeiN gene, yeiC gene, elaB gene, elaA gene, elaC gene, elaD gene, yfbK gene, yfbL gene, yfbM gene, yfbN gene, yfbO gene, yfbP gene, yfcC gene, yfcD gene, yfcE gene, yfcF gene, yfcG gene, folX gene, yfcH gene, yfcI gene, hisP gene, hisM gene, hisQ gene, hisJ gene, argT gene, ypdA gene, ypdB gene, ypdC gene, ypdD gene, ypdE gene, ypdF gene, ypdG gene, ypdH gene, pinH gene, ypjB gene, ypjC gene, ileY gene, ygaQ gene, ygaR gene, yqaC gene, yqaD gene, ygaT gene, csiR gene, ygaU gene, yqaE gene, ygaV gene, ygaP gene, stpA gene, ygaW gene, ygaC gene, ygaM gene, nrdH gene, nrdI gene, nrdE gene, proV gene, proW gene, proX gene, ygaX gene, ygaY gene, ygaZ gene, ygaH gene, srlA gene, srlE gene, srlB gene, srlD gene, gutM gene, srlR gene, gutQ gene, yqeG gene, yqeH gene, yqeI gene, yqeJ gene, yqeK gene, ygeF gene, ygeG gene, ygeH gene, ygeI gene, pbl gene, ygeK gene, ygeL gene, ygeM gene, ygeN gene, ygeO gene, ygeP gene, ygeQ gene, glyU gene, ygeR gene, xdhA gene, xdhB gene, xdhC gene, ygeV gene, ygeW gene, ygeX gene, ygeY gene, hyuA gene, yqeA gene, yqeB gene, yqeC gene, ygfJ gene, ygfK gene, ssnA gene, ygfM gene, xdhD gene, ygfO gene, guaD gene, ygfQ gene, ygfS gene, ygfT gene, ygfU gene, idi gene, cmtA gene, cmtB gene, yghD gene, yghE gene, yghF gene, yghG gene, pppA gene, yghJ gene, yghK gene, glcB gene, glcG gene, glcF gene, glcE gene, glcD gene, glcC gene, yghO gene, yghQ gene, yghR gene, yghS gene, yghT gene, ygiS gene, ygiT gene, ygiU gene, ygiV gene, ygiW gene, qseB gene, qseC gene, ygiZ gene, mdaB gene, ygiN gene, gltF gene, yhcA gene, yhcD gene, yhcE gene, yhcF gene, yhcG gene, yhcH gene, nanK gene, nanE gene, yhdJ gene, yhdU gene, envR gene, acrE gene, acrF gene, yhdV gene, yhdW gene, yhdX gene, yhdY gene, yijP gene, yijO gene, frwD gene, pflC gene, pflD gene, frwB gene, frwC gene, ptsA gene, rhaT gene, rhaR gene, rhaS gene, rhaB gene, rhaA gene, rhaD gene, yiiL gene, frvA gene, frvB gene, frvX gene, frvR gene, yiiG gene, yiiF gene, yiiE gene, yiiD gene, dtd gene, rbn gene, yihX gene, yihW gene, yihV gene, yihU gene, yihT gene, yihS gene, yihR gene, yihQ gene, yihP gene, yihO gene, ompL gene, yihN gene, yihM gene, yihL gene, hsrA gene, rbsR gene, rbsK gene, rbsB gene, rbsC gene, rbsA gene, rbsD gene, trkD gene, yieN gene, yieM gene, asnA gene, yidB gene, yidA gene, yidX gene, dgoR gene, dgoK gene, dgoA gene, dgoD gene, dgoT gene, cbrA gene, yidR gene, yidQ gene, yidE gene, yidP gene, glvC gene, glvB gene, glvG gene, ysdC gene, yidL gene, yidK gene, yidJ gene, yidI gene, yidH gene, yidG gene, yidF gene, yhiN gene, yhiM gene, yhiL gene, yhiK gene, yhiJ gene, yhiI gene, rbbA gene, yhhJ gene, chiA gene, bfd gene, bfr gene, gspO gene, gspM gene, gspL gene, gspK gene, gspJ gene, gspI gene, gspH gene, gspG gene, gspF gene, gspE gene, gspD gene, gspC gene, gspA gene, pioO gene, yjbE gene, yjbF gene, yjbG gene, yjbH gene, yjbA gene, xylE gene, malG gene, malF gene, malE gene, malK gene, lamB gene, malM gene, yjbI gene, yjcP gene, yjcQ gene, yjcR gene, yjcS gene, alsK gene, alsE gene, alsC gene, alsA gene, alsB gene, yjdP gene, phnP gene, phnO gene, phnN gene, phnM gene, phnL gene, phnK gene, phnJ gene, phnI gene, phnH gene, phnG gene, phnF gene, phnE(JW4064) gene, phnE(JW4065) gene, phnD gene, phnC gene, phnB gene, phnA gene, yjdA gene, yjcZ gene, yjfI gene, yjfJ gene, yjfK gene, yjfL gene, yjfM gene, yjfC gene, aidB gene, yjfN gene, yjfO gene, yjfP gene, ulaR gene, ulaG gene, ulaA gene, ulaB gene, ulaC gene, ulaD gene, ulaE gene, yjhS gene, yjhT gene, yjhA gene, fimB gene, fimE gene, fimA gene, fimI gene, fimC gene, fimD gene, fimF gene, fimG gene, fimH gene, gntP gene, uxuA gene, uxuB gene, uxuR gene, yjiC gene, yjiD gene, yjiE gene, iadA gene, yjiG gene, yjiH gene, kptA gene, yjiJ gene, yjiK gene, yjiL gene, yjiM gene, yjiN gene, yjiO gene, yjiP gene, yjiQ gene, yjiR gene, yjiS gene, yjiT gene, yjiV gene, mcrC gene, mcrB gene, yjiW gene, hsdS gene, hsdM gene, hsdR gene, mrr gene, yjiA gene, yjiX gene, yjiY gene, tsr gene, yjiZ gene, yjjM gene, yjjN gene, mdoB gene, yjjA gene
[0125] [3] chpA gene, uspG gene, ybdR gene, rnk gene, rna gene, citT gene, citG gene, citX gene, citF gene, citE gene, citD gene, citC gene, citA gene, citB gene, dcuC gene, crcA gene, cspE gene, crcB gene, ybeH gene, ybeM gene, yqcA gene, yqcB gene, yqcC gene, syd gene, yqcD gene, ygdH gene, sdaC gene, sdaB gene, exo gene, fucO gene, fucA gene, fucP gene, fucI gene, fucK gene, fucU gene, fucR gene, ygdE gene, ygdD gene, gcvA gene, ygdI gene, csdA gene, ygdK gene, araD gene, araA gene, araB gene, araC gene, yabI gene, thiQ gene, thiP gene, tbpA gene, sgrR gene, setA gene, yhfZ gene, yhfY gene, yhfX gene, yhfW gene, php gene, ylifU gene, yhfT gene, yhfS gene, frlR gene, frlD gene, frlC gene, frlB gene, frlA gene, yhfL gene, pncA gene, ydjE gene, ydjF gene, ydjG gene, ydjH gene, ydjI gene, ydjJ gene, ydjK gene, ydjL gene, yeaC gene, yeaA gene, ade gene, yicO gene, yicN gene, yicM gene, yicS gene, nlpA gene, yicL gene, setC gene, ygjI gene, ygjJ gene, ygjK gene, fadH gene, ygjM gene, ygjN gene, ygjO gene, ygjP gene, ygjQ gene, ygjR gene, alx gene, sstT gene, ygjV gene, yrhB gene, yrhA gene, yhhZ gene, yhhY gene, yhhX gene, yhhW gene, yeaK gene, yoaI gene, yeaL gene, yeaM gene, yeaN gene, yeaO gene, yoaF gene, yeaP gene, yeaQ gene, yoaG gene, yeaR gene, yeaS gene, yeaT gene, yeaU gene, yeaV gene, yeaW gene, yeaX gene, hyfA gene, hyfB gene, hyfC gene, hyfD gene, hyfE gene, hyfF gene, hyfG gene, hyfH gene, hyfI gene, hyfJ gene, hyfR gene, and focB gene.
[0126] (24) The E. coli mutant strain obtained via modification of the E. coli mutant strain according to any one of (1) to (23) by a method selected from among the following [1] to [5]:
[0127] [1] a method for reducing or removing at least one mechanism for regulating biosynthesis of the useful substance;
[0128] [2] a method for increasing the expression of at least one enzyme associated with biosynthesis of the useful substance;
[0129] [3] a method for increasing the copy number of at least one enzyme gene associated with biosynthesis of the useful substance;
[0130] [4] a method for attenuating or blocking at least one metabolic pathway which branches from the biosynthetic pathway of the useful substance into metabolites other than the useful substance; or
[0131] [5] a method for selecting a strain that exhibits higher resistance to an analogue of a useful substance than a wild-type E. coli strain.
[0132] (25) The E. coli mutant strain according to any one of (1) to (24), wherein the E. coli strain is the E. coli K-12, B, or W strain.
[0133] (26) The E. coli mutant strain according to (25), wherein the E. coli K-12 strain is the E. coli W3110 strain (ATCC27325) or the E. coli MG1655 strain (ATCC47076).
[0134] (27) A method for producing a useful substance comprising culturing the E. coli mutant strain according to any one of (1) to (26) in a medium so as to generate and accumulate the useful substance in the culture and recovering the useful substance from the culture.
[0135] (28) The method according to any one of (24) to (27), wherein the useful substance is selected from the group consisting of proteins, amino acids, nucleic acids, vitamins, saccharides, organic acids, and lipids.

### Effect of the Invention

[0136] The present invention can provide an E. coli mutant, the amount of E. coli cells of which, after a given period of culture, is larger than that of a wild-type E. coli strain, and a process for producing a useful substance using such mutant.

### BEST MODES FOR CARRYING OUT THE INVENTION

[0137] In the present description, the wild-type E. coli strains may be any E. coli strains that are found in natural populations at the highest frequency. Examples thereof include the E. coli W3110 strain (ATCC27325) and the E. coli MG1655 strain (ATCC47076) that belong to the E. coli K-12 strain, the ATCC11303 strain that belongs to the E. coli B strain, and the ATCC9637 strain that belongs to the E. coli W strain.

[0138] The nucleotide sequence as shown in SEQ ID NO: 1 in the present specification is the full-length nucleotide sequence of chromosomal DNA of the E. coli W3110 strain registered as of Aug. 16, 2007 on the internet site URL::http://www.ncbi.nlm.nih.gov/entrez/viewer.fcgi?db=nuccore &id=89106884. The above-mentioned nucleotide sequence shown in the internet site is a nucleotide sequence of Accession No. AC_{—}000091 in NCBI (National Center for Biothechnology Information) GenBank.

[0139] In addition, the name of each gene on the Escherichia coli chromosome, which is used in the above-mentioned internet site, is used in Table 1 and Table 2 of the present description.

[0140] In Table 1, the gene shown by the gene name ykgM(JW5034) refers to nucleotides 311598 to 311738 of the nucleotide sequence as shown in SEQ ID NO: 1, the gene shown by the gene name ykgM(JW5035) refers to nucleotides 311738 to 312001 of the nucleotide sequence as shown in SEQ ID NO: 1, the gene shown by the gene name phnE(JW4064) refers to nucleotides 4327121 to 4327489 of the nucleotide sequence, and the gene shown by the gene name phnE(JW4065) refers to nucleotides 4327339 to 4327959 of the nucleotide sequence as shown in SEQ ID NO: 1.

[0141] The term chromosomal DNA that contains genes refers to chromosomal DNA that contains a specific structural gene and a region containing a specific regulatory function such as a promoter, operator or the like.

[0142] In the present specification, the term chromosomal DNA that does not contain gene refers to chromosomal DNA that does not contain a part of or an entire structural gene of a given gene or chromosomal DNA that does not contain a region having a specific regulatory function, such as a promoter and/or operator of such gene.

[0143] The chromosomal DNA that does not contain part of a structural gene is DNA that does not contain part of a structural gene, and a functional protein is not transcribed and expressed from the structural gene. Examples thereof include DNA that has no initiation codon due to a lack of the 5′ end region of the structural gene and DNA that lacks most of the 3′ end region, such as 10% or more, preferably 20% or more, more preferably 30% or more, and further preferably 40% or more of the entire 3′ end region. Chromosomal DNA that does not contain two adjacent genes may be chromosomal DNA that does not contain DNA consisting of the nucleotide sequence located between such genes.

[0144] The homologous gene refers to a gene that shows sequence homology of the nucleotide sequence of the gene in the Escherichia coli species, or a gene encoding a protein having an amino acid sequence showing sequence homology. Showing sequence homology means that a nucleotide sequence shows sequence similarity of not less than 85%, preferably not less than 90%, more preferably not less than 95%, still more preferably not less than 98%, particularly preferably not less than 99%, or an amino acid sequence shows sequence similarity of not less than 80%, preferably not less than 90%, more preferably not less than 95%, still more preferably not less than 98%, particularly preferably not less than 99%.

[0145] The E. coli mutant strain having a chromosomal DNA containing not more than 10% of a particular set of genes or homologous gene thereof means an E. coli mutant strain having a chromosomal DNA lacking not less than 90%, preferably not less than 95%, more preferably not less than 98%, still more preferably not less than 99%, of a gene selected from a set of genes or homologous gene thereof.

[0146] The DNA equivalent to DNA comprising a nucleotide sequence represented by given nucleotide numbers in the nucleotide sequence as shown in SEQ ID NO: 1 may be any DNA, as far as it is substantially the same as DNA having a nucleotide sequence represented by such given nucleotide numbers of an E. coli species in terms of the composition of the gene contained and the position on chromosomal DNA. When compositions of genes contained in DNA are substantially the same as each other, genes contained in such DNA are composed of genes identical or homologous to each other, and arranged in the same order. In that case, nucleotide sequences may differ among genes. When the DNA having a nucleotide sequence represented by given nucleotide numbers contains an insertion sequence, however, such insertion sequence may be absent in DNA equivalent to the aforementioned DNA.

[0147] Substantially the same positions on chromosomal DNA refers to the following conditions. When adenine of the initiation codon of the thrL gene on E. coli chromosomal DNA is designated as No. 190 and the nucleotide sequence of chromosomal DNA is numbered along the coding chain of the thrL gene, differences between such nucleotide numbers and the given nucleotide numbers are 50 or smaller, preferably 30 or smaller, more preferably 10 or smaller, and further preferably 5 or smaller. When the DNA having a nucleotide sequence represented by given nucleotide numbers contains an insertion sequence, however, DNA equivalent to the aforementioned DNA does not necessarily contain such insertion sequence. Thus, such insertion sequence and nucleotide numbers may be different. An example of DNA equivalent to DNA having a nucleotide sequence represented by given nucleotide numbers of the nucleotide sequence as shown in SEQ ID NO: 1 is DNA having sequence similarity of 80% or more, preferably 90% or more, more preferably 95% or more, further preferably 98% or more, and particularly preferably 99% or more with the nucleotide sequence represented by given nucleotide numbers.

[0148] Sequence similarity of amino acid sequence or nucleotide sequence can be determined with the utilization of the BLAST algorithm of Karlin and Altschul (Pro. Natl. Acad. Sci., U.S.A., 90, 5873, 1993) or the FASTA algorithm (Methods Enzymol., 183, 63, 1990). Based on the BLAST algorithm, programs referred to as BLASTN or BLASTX have been developed (J. Mol. Biol., 215, 403, 1990). When analyzing nucleotide sequences by BLASTN based on BLAST, the score parameter is set to 100 and the word length parameter is set to 12, for example. When analyzing amino acid sequences via BLASTX based on BLAST, the score parameter is set to 50 and the word length parameter is set to 3, for example. When using BLAST and Gapped BLAST programs, the default parameters thereof are used. Specific procedures of such analytical methods are known (http://www.ncbi.nlm.nih.gov.).

1. E. coli Mutant Strain of the Present Invention

[0149] The E. coli mutant strain of the present invention may be (1) any E. coli mutant strain comprising chromosomal DNA that comprise any gene excluding the genes [2] that are present on chromosomal DNA of a wild-type E. coli strain or any E. coli mutant strain comprising chromosomal DNA that does not comprise any gene excluding the genes [1], provided that it comprises the genes [1], and does not comprise the genes [2] and having chromosomal DNA that is at least 1040 kbp shorter than that of a wild-type E. coli strain,
[0150] [1] thrL gene, thrA gene, thrB gene, thrC gene, talB gene, mog gene, htgA gene, dnaK gene, dnaJ gene, hokC gene, mokC gene, sokC gene, nhaA gene, nhaR gene, rpsT gene, ribF gene, ileS gene, lspA gene, fkpB gene, ispH gene, rihC gene, dapB gene, carA gene, carB gene, caiF gene, caiE gene, caiD gene, caiC gene, caiB gene, caiA gene, caiT gene, fixA gene, fixB gene, fixC gene, fixX gene, kefF gene, kefC gene, folA gene, apaH gene, apaG gene, ksgA gene, pdxA gene, surA gene, imp gene, djlA gene, rluA gene, hepA gene, polB gene, leuD gene, leuC gene, leuB gene, leuA gene, leuL gene, leuO gene, ilvI gene, ilvH gene, fruR gene, mraZ gene, mraW gene, ftsL gene, ftsI gene, murE gene, murF gene, mraY gene, murD gene, ftsW gene, murG gene, murC gene, ddlB gene, ftsQ gene, ftsA gene, ftsZ gene, lpxC gene, secM gene, secA gene, mutT gene, coaE gene, guaC gene, hofC gene, hofB gene, ppdD gene, nadC gene, ampD gene, ampE gene, aroP gene, pdhR gene, aceE gene, aceF gene, lpd gene, acnB gene, speD gene, speE gene, cueO gene, gcd gene, hpt gene, can gene, panD gene, panC gene, panB gene, htrE gene, ecpD gene, folK gene, pcnB gene, dksA gene, sfsA gene, ligT gene, hrpB gene, mrcB gene, hemL gene, clcA gene, btuF gene, pfs gene, dgt gene, degP gene, cdaR gene, dapD gene, glnD gene, map gene, tff gene, rpsB gene, tsf gene, pyrH gene, frr gene, dxr gene, ispU gene, cdsA gene, hlpA gene, lpxD gene, fabZ gene, lpxA gene, lpxB gene, rnhB gene, dnaE gene, accA gene, ldcC gene, tilS gene, rof gene, nlpE gene, proS gene, rcsF gene, metQ gene, metI gene, metN gene, gmhB gene, rrsH gene, ileV gene, alaV gene, rrlH gene, rrfH gene, aspU gene, dkgB gene, mltD gene, gloB gene, rnhA gene, dnaQ gene, aspV gene, ivy gene, fadE gene, lpcA gene, pepD gene, gpt gene, frsA gene, crl gene, phoE gene, proB gene, proA gene, thrW gene, hemB gene, proC gene, aroL gene, aroM gene, rdgC gene, mak gene, araJ gene, sbcC gene, sbcD gene, phoB gene, phoR gene, brnQ gene, proY gene, malZ gene, queA gene, tgt gene, secD gene, secF gene, tsx gene, ribD gene, ribE gene, nusB gene, thiL gene, pgpA gene, dxs gene, ispA gene, xseB gene, thiI gene, panE gene, cyoE gene, cyoD gene, cyoC gene, cyoB gene, cyoA gene, ampG gene, bolA gene, tig gene, clpP gene, clpX gene, lon gene, hupB gene, ppiD gene, cof gene, mdlA gene, mdlB gene, glnK gene, amtB gene, tesB gene, ffs gene, maa gene, hha gene, acrB gene, acrA gene, acrR gene, kefA gene, priC gene, apt gene, dnaX gene, recR gene, htpG gene, adk gene, hemH gene, aes gene, gsk gene, fsr gene, ushA gene, copA gene, cueR gene, gcl gene, hyi gene, purK gene, purE gene, lpxH gene, ppiB gene, cysS gene, folD gene, sfmA gene, sfmC gene, sfmD gene, sfmH gene, sfmF gene, fimZ gene, argU gene, entD gene, fepA gene, fes gene, entF gene, fepE gene, fepC gene, fepG gene, fepD gene, fepB gene, entC gene, entE gene, entB gene, entA gene, cstA gene, dsbG gene, ahpC gene, ahpF gene, tatE gene, lipA gene, lipB gene, dacA gene, rlpA gene, mrdB gene, mrdA gene, cobC gene, nadD gene, holA gene, rlpB gene, leuS gene, lnt gene, miaB gene, ubiF gene, glnX gene, glnV gene, metU gene, glnW gene, ginU gene, leuW gene, metT gene, asnB gene, nagD gene, nagC gene, nagA gene, nagB gene, nagE gene, glnS gene, fur gene, fldA gene, seqA gene, pgm gene, potE gene, speF gene, kdpE gene, kdpD gene, kdpC gene, kdpB gene, kdpA gene, nei gene, abrB gene, gltA gene, sdhC gene, sdhD gene, sdhA gene, sdhB gene, sucA gene, sucB gene, sucC gene, sucD gene, mngR gene, mngA gene, mngB gene, cydA gene, cydB gene, tolQ gene, tolR gene, tolA gene, tolB gene, pal gene, lysT gene, valT gene, lysW gene, valZ gene, lysY gene, lysZ gene, lysQ gene, nadA gene, pnuC gene, zitB gene, aroG gene, gpmA gene, galM gene, galK gene, galT gene, galE gene, modF gene, modE gene, modA gene, modB gene, modC gene, bioA gene, bioB gene, bioF gene, bioC gene, bioD gene, uvrB gene, moaA gene, moaB gene, moaC gene, moaD gene, moaE gene, rhlE gene, dps gene, rhtA gene, ompX gene, rybA gene, mntR gene, fsaA gene, moeB gene, moeA gene, iaaA gene, cmr gene, rybB gene, grxA gene, poxB gene, her gene, hcp gene, aqpZ gene, macA gene, macB gene, cspD gene, clpS gene, clpA gene, serW gene, infA gene, aat gene, cydC gene, cydD gene, trxB gene, lrp gene, ftsK gene, lolA gene, serS gene, dmsA gene, dmsB gene, dmsC gene, pflA gene, pflB gene, focA gene, serC gene, aroA gene, cmk gene, rpsA gene, ihfB gene, msbA gene, lpxK gene, kdsB gene, smtA gene, mukF gene, mukE gene, mukB gene, aspC gene, ompF gene, asnS gene, pncB gene, pepN gene, ssuB gene, ssuC gene, ssuD gene, ssuA gene, ssuE gene, pyrD gene, uup gene, pqiA gene, pqiB gene, rmf gene, fabA gene, ompA gene, sulA gene, helD gene, mgsA gene, serT gene, hyaA gene, hyaB gene, hyaC gene, hyaD gene, hyaE gene, hyaF gene, appC gene, appB gene, appA gene, etp gene, serX gene, csgG gene, csgF gene, csgE gene, csgD gene, csgB gene, csgA gene, csgC gene, mdoC gene, mdoG gene, mdoH gene, msyB gene, mdtG gene, lpxL gene, solA gene, dinI gene, pyrC gene, grxB gene, mdtH gene, rimJ gene, mviM gene, mviN gene, flgN gene, flgM gene, flgA gene, flgB gene, flgC gene, flgD gene, flgE gene, flgF gene, flgG gene, flgH gene, figI gene, flgJ gene, flgK gene, flgL gene, rne gene, rluC gene, sraB gene, rpmF gene, plsX gene, fabH gene, fabD gene, fabG gene, acpP gene, fabF gene, pabC gene, tmk gene, holB gene, ptsG gene, fhuE gene, hinT gene, nagZ gene, ndh gene, mfd gene, lolC gene, lolD gene, lolE gene, cobB gene, potD gene, potC gene, potB gene, potA gene, pepT gene, phoQ gene, phoP gene, purB gene, hflD gene, trmU gene, minE gene, minD gene, minC gene, hlyE gene, umuD gene, umuC gene, dsbB gene, nhaB gene, fadR gene, dadA gene, dadX gene, cvrA gene, ldcA gene, emtA gene, treA gene, dhaH gene, dhaL gene, dhaK gene, dhaR gene, pth gene, prsA gene, ispE gene, lolB gene, hemA gene, prfA gene, prmC gene, kdsA gene, ldrA gene, rdlA gene, ldrB gene, rdlB gene, ldrC gene, rdlC gene, chaA gene, chaB gene, chaC gene, narL gene, narX gene, narK gene, narG gene, narH gene, narJ gene, narI gene, rttR gene, tpr gene, tyrV gene, tyrT gene, purU gene, rssA gene, rssB gene, galU gene, has gene, tdk gene, adhE gene, oppA gene, oppB gene, oppC gene, oppD gene, oppF gene, cls gene, kch gene, tonB gene, ompW gene, trpA gene, trpB gene, trpC gene, trpD gene, trpE gene, trpL gene, rluB gene, btuR gene, sohB gene, topA gene, cysB gene, acnA gene, ribA gene, pgpB gene, pyrF gene, osmB gene, gmr gene, rnb gene, fabI gene, sapF gene, sapD gene, sapC gene, sapB gene, sapA gene, puuP gene, puuA gene, puuD gene, puuR gene, puuC gene, puuB gene, puuE gene, pspF gene, pspA gene, pspB gene, pspC gene, pspD gene, pspE gene, ompG gene, tyrR gene, tpx gene, mpaA gene, mppA gene, uspE gene, fnr gene, ogt gene, abgT gene, abgB gene, abgA gene, abgR gene, isrA gene, dbpA gene, uspF gene, ompN gene, micC gene, hslJ gene, idhA gene, feaR gene, feaB gene, tynA gene, maoC gene, paaA gene, paaB gene, paaC gene, paaD gene, paaE gene, paaF gene, paaG gene, paaH gene, paaI gene, paaJ gene, paaK gene, paaX gene, paaY gene, azoR gene, hrpA gene, aldA gene, gapC_{—}2 gene, gapC_{—}1 gene, cybB gene, hokB gene, mokB gene, sokB gene, trg gene, mdoD gene, rimL gene, tehA gene, tehB gene, ansP gene, nhoA gene, nary gene, narW gene, narY gene, narZ gene, narU gene, fdnG gene, fdnH gene, fdnI gene, adhP gene, sfcA gene, sra gene, bdm gene, osmC gene, ddpF gene, ddpD gene, ddpC gene, ddpB gene, ddpA gene, ddpX gene, dos gene, gadC gene, gadB gene, pqqL gene, hipA gene, hipB gene, ego gene, lsrC gene, lsrD gene, lsrB gene, lsrF gene, lsrG gene, tam gene, uxaB gene, marC gene, marR gene, marA gene, marB gene, eamA gene, dcp gene, rspB gene, rspA gene, speG gene, dmsD gene, clcB gene, dgsA gene, asr gene, mdtI gene, mdtJ gene, pntB gene, pntA gene, folM gene, rstA gene, rstB gene, tus gene, fumC gene, fumA gene, manA gene, uidC gene, uidB gene, uidA gene, uidR gene, hdhA gene, malI gene, malX gene, malY gene, add gene, blr gene, rsxA gene, rsxB gene, rsxC gene, rsxD gene, rsxG gene, rsxE gene, nth gene, gst gene, pdxY gene, tyrS gene, pdxH gene, slyB gene, slyA gene, sodC gene, nemA gene, gloA gene, rnt gene, lhr gene, sodB gene, purR gene, cfa gene, ribC gene, mdtK gene, valV gene, valW gene, pykF gene, lpp gene, sufE gene, sufS gene, sufD gene, sufC gene, sufB gene, sufA gene, rydB gene, rprA gene, aroD gene, pps gene, aroH gene, nlpC gene, btuD gene, btuE gene, btuC gene, ihfA gene, pheT gene, pheS gene, pheM gene, rplT gene, rpmI gene, infC gene, thrS gene, arpB_{—}1 gene, arpB_{—}2 gene, pfkB gene, cedA gene, katE gene, chbG gene, chbF gene, chbR gene, chbA gene, chbC gene, chbB gene, osmE gene, nadE gene, spy gene, astE gene, astB gene, astD gene, astA gene, astC gene, xthA gene, nudG gene, gdhA gene, topB gene, selD gene, sppA gene, ansA gene, gapA gene, mipA gene, rnd gene, fadD gene, pabB gene, sdaA gene, manX gene, manY gene, manZ gene, rrmA gene, cspC gene, kdgR gene, htpX gene, prc gene, proQ gene, pphA gene, ryeA gene, ryeB gene, holE gene, exoX gene, ptrB gene, purT gene, eda gene, edd gene, zwf gene, pykA gene, lpxM gene, znuA gene, znuC gene, znuB gene, ruvB gene, ruvA gene, ruvC gene, nudB gene, aspS gene, torZ gene, torY gene, cutC gene, argS gene, leuZ gene, cysT gene, glyW gene, pgsA gene, dsrA gene, serU gene, asnT gene, shiA gene, amn gene, asnW gene, asnU gene, cbl gene, nac gene, asnV gene, erfK gene, cobT gene, cobS gene, cobU gene, sbmC gene, dacD gene, sbcB gene, hisL gene, hisG gene, hisD gene, hisC gene, hisB gene, hisH gene, hisA gene, hisF gene, hisI gene, cld gene, ugd gene, gnd gene, galF gene, wcaM gene, wcaL gene, wcaK gene, wzxC gene, wcaJ gene, cpsG gene, cpsB gene, wcaI gene, nudD gene, fcl gene, gmd gene, wcaF gene, wcaE gene, wcaD gene, wcaC gene, wcaB gene, wcaA gene, wzc gene, wzb gene, wza gene, asmA gene, dcd gene, udk gene, thiD gene, thiM gene, mrp gene, metG gene, dusC gene, cdd gene, sanA gene, mglC gene, mglA gene, mglB gene, galS gene, folE gene, cirA gene, lysP gene, nfo gene, fruA gene, fruK gene, fruB gene, setB gene, spr gene, rtn gene, bcr gene, rsuA gene, rplY gene, proL gene, narP gene, ccmH gene, ccmG gene, ccmF gene, ccmE gene, ccmD gene, ccmC gene, ccmB gene, ccmA gene, napC gene, napB gene, napH gene, napG gene, napA gene, napD gene, napF gene, eco gene, mqo gene, alkB gene, ada gene, ompC gene, micF gene, rcsD gene, rcsB gene, rcsC gene, atoS gene, atoC gene, atoD gene, atoA gene, atoE gene, atoB gene, gyrA gene, ubiG gene, nrdA gene, nrdB gene, inaA gene, glpQ gene, glpT gene, glpA gene, glpB gene, glpC gene, ais gene, arnT gene, pmrD gene, menE gene, menC gene, menB gene, menD gene, menF gene, nuoN gene, nuoM gene, nuoL gene, nuoK gene, nuoJ gene, nuoI gene, nuoH gene, nuoG gene, nuoF gene, nuoE gene, nuoC gene, nuoB gene, nuoA gene, lrhA gene, ackA gene, pta gene, ubiX gene, purF gene, cvpA gene, dedD gene, folC gene, accD gene, dedA gene, truA gene, usg gene, pdxB gene, flk gene, fabB gene, trmC gene, mepA gene, aroC gene, prmB gene, sixA gene, fadL gene, vacJ gene, argW gene, dsdC gene, dsdX gene, dsdA gene, emrY gene, emrK gene, evgA gene, evgS gene, oxc gene, frc gene, ddg gene, glk gene, mntH gene, nupC gene, alaX gene, alaW gene, gltX gene, valU gene, valX gene, valY gene, lysV gene, xapR gene, xapB gene, xapA gene, ligA gene, zipA gene, cysZ gene, cysK gene, ptsH gene, ptsI gene, crr gene, pdxK gene, cysM gene, cysA gene, cysW gene, cysU gene, cysP gene, ucpA gene, murP gene, amiA gene, hemF gene, eutL gene, eutC gene, eutB gene, eutA gene, eutH gene, eutG gene, eutJ gene, eutE gene, cchB gene, cchA gene, eutI gene, eutT gene, eutQ gene, eutP gene, maeB gene, talA gene, tktB gene, aegA gene, narQ gene, acrD gene, dapE gene, purC gene, nlpB gene, dapA gene, gcvR gene, bcp gene, hda gene, uraA gene, upp gene, purM gene, purN gene, ppk gene, ppx gene, guaA gene, guaB gene, xseA gene, der gene, hisS gene, ispG gene, ndk gene, pbpC gene, sseA gene, ryfA gene, sseB gene, pepB gene, fdx gene, hscA gene, hscB gene, iscA gene, iscU gene, iscS gene, iscR gene, suhB gene, csiE gene, hcaT gene, hcaR gene, hcaE gene, hcaF gene, hcaC gene, hcaB gene, hcaD gene, glyA gene, hmp gene, glnB gene, sroF gene, purL gene, tadA gene, acpS gene, pdxJ gene, recO gene, era gene, rnc gene, lepB gene, lepA gene, rseC gene, rseB gene, rseA gene, rpoE gene, nadB gene, srmB gene, ung gene, trxC gene, pssA gene, kgtP gene, rrfG gene, rrlG gene, gltW gene, rrsG gene, clpB gene, rluD gene, pheL gene, pheA gene, tyrA gene, aroF gene, rplS gene, trmD gene, rimM gene, rpsP gene, ffh gene, grpE gene, recN gene, smpA gene, smpB gene, ssrA gene, gabD gene, gabT gene, gabP gene, nrdF gene, mprA gene, emrA gene, emrB gene, luxS gene, sraD gene, gshA gene, argQ gene, argZ gene, argY gene, argV gene, serV gene, csrA gene, alaS gene, recX gene, recA gene, mltB gene, norR gene, norV gene, norW gene, hypF gene, hydN gene, ascG gene, ascF gene, ascB gene, hycI gene, hycH gene, hycG gene, hycF gene, hycE gene, hycD gene, hycC gene, hycB gene, hycA gene, hypA gene, hypB gene, hypC gene, hypD gene, hypE gene, fhlA gene, mutS gene, pphB gene, rpoS gene, nlpD gene, pcm gene, surE gene, truD gene, ispF gene, ispD gene, ftsB gene, cycC gene, cycN gene, cysD gene, iap gene, cycH gene, cycI gene, cysJ gene, eno gene, pyrG gene, mazG gene, chpR gene, relA gene, rumA gene, barA gene, gudD gene, gudX gene, gudP gene, mltA gene, metZ gene, metW gene, metV gene, amiC gene, argA gene, recD gene, recB gene, ptr gene, recC gene, ppdC gene, ppdB gene, ppdA gene, thyA gene, lgt gene, ptsP gene, nudH gene, mutH gene, tas gene, aas gene, rygA gene, rygB gene, galR gene, lysA gene, lysR gene, araE gene, kduD gene, kduI gene, lysS gene, prfB gene, recJ gene, dsbC gene, xerD gene, fldB gene, bglA gene, gcvP gene, gcvH gene, gcvT gene, visC gene, ubiH gene, pepP gene, zapA gene, ssrS gene, rygC gene, serA gene, rpiA gene, argP gene, argK gene, argO gene, mscS gene, fbaA gene, pgk gene, epd gene, tktA gene, speB gene, speA gene, metK gene, galP gene, sprT gene, endA gene, gshB gene, ansB gene, mutY gene, mltC gene, nupG gene, speC gene, pheV gene, pitB gene, gss gene, hybG gene, hybF gene, hybE gene, hybD gene, hybC gene, hybB gene, hybA gene, hybO gene, exbD gene, exbB gene, metC gene, dkgA gene, sufI gene, plsC gene, parC gene, parE gene, cpdA gene, nudF gene, tolC gene, zupT gene, ribB gene, glgS gene, rygD gene, rfaE gene, glnE gene, htrG gene, cca gene, bacA gene, folB gene, ttdA gene, ttdB gene, rpsU gene, dnaG gene, rpoD gene, ileX gene, aer gene, ebgR gene, ebgA gene, ebgC gene, uxaA gene, uxaC gene, exuT gene, exuR gene, tdcG gene, tdcF gene, tdcE gene, tdcD gene, tdcC gene, tdcB gene, tdcA gene, tdcR gene, rnpB gene, garK gene, garR gene, garL gene, garP gene, garD gene, sohA gene, agaR gene, kbaZ gene, agaV gene, agaW gene, agaA gene, agaS gene, kbaY gene, agaB gene, agaC gene, agaD gene, agaI gene, mtr gene, deaD gene, nlpI gene, pnp gene, sraG gene, rpsO gene, truB gene, rbfA gene, infB gene, nusA gene, metY gene, argG gene, leuU gene, secG gene, glmM gene, folP gene, ftsH gene, rrmJ gene, greA gene, dacB gene, obgE gene, rpmA gene, rplU gene, ispB gene, sfsB gene, murA gene, kdsD gene, kdsC gene, rpoN gene, ptsN gene, npr gene, mtgA gene, elbB gene, ryhA gene, arcB gene, gltB gene, gltD gene, nanT gene, nanA gene, nanR gene, dcuD gene, sspB gene, sspA gene, rpsI gene, rplM gene, degQ gene, degS gene, mdh gene, argR gene, aaeB gene, aaeA gene, aaeX gene, aaeR gene, tldD gene, rng gene, mreD gene, mreC gene, mreB gene, accB gene, accC gene, panF gene, prmA gene, dusB gene, fis gene, rrfF gene, thrV gene, rrfD gene, rrlD gene, gltV gene, rrsD gene, purH gene, purD gene, zraR gene, zraS gene, zraP gene, hupA gene, nfi gene, hemE gene, nudC gene, rsd gene, thiC gene, thiE gene, thiF gene, thiS gene, thiG gene, thiH gene, htrC gene, rpoC gene, rpoB gene, rplL gene, rplJ gene, rplA gene, rplK gene, nusG gene, secE gene, tufB gene, thrT gene, glyT gene, tyrU gene, thrU gene, coaA gene, birA gene, murB gene, rrfB gene, rrlB gene, gltT gene, rrsB gene, murI gene, btuB gene, trmA gene, fabR gene, sthA gene, oxyR gene, oxyS gene, argH gene, argB gene, argC gene, argE gene, ppc gene, fsaB gene, gldA gene, katG gene, metF gene, metL gene, metB gene, metJ gene, rpmE gene, priA gene, cytR gene, ftsN gene, hslV gene, hslU gene, menA gene, rraA gene, glpF gene, glpK gene, glpX gene, fpr gene, tpiA gene, cdh gene, sbp gene, pfkA gene, fieF gene, cpxP gene, cpxR gene, cpxA gene, kdgT gene, sodA gene, fdhD gene, fdoG gene, fdoH gene, fdoI gene, fdhE gene, bipA gene, ginA gene, glnL gene, glnG gene, hemN gene, csrC gene, spf gene, polA gene, dsbA gene, mobA gene, mobB gene, rrfA gene, rrlA gene, alaT gene, ileT gene, rrsA gene, hemG gene, trkH gene, pepQ gene, fadB gene, fadA gene, fre gene, ubiD gene, rfaH gene, tatD gene, tatC gene, tatB gene, tatA gene, ubiB gene, ubiE gene, rmuC gene, udp gene, metE gene, metR gene, pldB gene, rhtB gene, rhtC gene, recQ gene, pldA gene, rarD gene, corA gene, uvrD gene, xerC gene, dapF gene, cyaY gene, cyaA gene, hemC gene, hemD gene, hemX gene, hemY gene, ryiA gene, aslA gene, aslB gene, proM gene, leuT gene, hisR gene, argX gene, rffM gene, wzyE gene, rffT gene, wzxE gene, rffA gene, rffC gene, rffH gene, rffG gene, rffD gene, rffE gene, wzzE gene, rfe gene, rho gene, rhoL gene, trxA gene, rhlB gene, gpp gene, rep gene, ppiC gene, ilvC gene, ilvY gene, ilvA gene, ilvD gene, ilvE gene, ilvM gene, ilvG_{—}2 gene, ilvG_{—}1 gene, ilvL gene, hdfR gene, trpT gene, aspT gene, rrfC gene, rrlC gene, gltU gene, rrsC gene, asnC gene, mioC gene, oriC gene, gidA gene, gidB gene, atpI gene, atpB gene, atpE gene, atpF gene, atpH gene, atpA gene, atpG gene, atpD gene, atpC gene, glmU gene, glmS gene, pstS gene, pstC gene, pstA gene, pstB gene, phoU gene, bglG gene, bglF gene, bglB gene, bglH gene, cbrC gene, mdtL gene, tnaB gene, tnaA gene, tnaC gene, trmE gene, rnpA gene, rpmH gene, dnaA gene, dnaN gene, recF gene, gyrB gene, ibpA gene, ibpB gene, emrD gene, ivbL gene, ilvB gene, ilvN gene, uhpA gene, uhpB gene, uhpC gene, uhpT gene, selC gene, gltS gene, recG gene, trmH gene, spoT gene, rpoZ gene, gmk gene, ligB gene, dinD gene, rph gene, pyrE gene, ttk gene, dut gene, dfp gene, rpmB gene, rpmG gene, mutM gene, coaD gene, kdtA gene, rfaQ gene, rfaG gene, rfaP gene, rfaS gene, rfaB gene, rfaI gene, rfaJ gene, rfaY gene, rfaZ gene, rfaK gene, rfaL gene, rfaC gene, rfaF gene, rfaD gene, htrL gene, kbl gene, tdh gene, envC gene, gpmI gene, grxC gene, secB gene, gpsA gene, cysE gene, lldD gene, lldR gene, lldP gene, mtlR gene, mtlD gene, mtlA gene, selA gene, selB gene, aldB gene, sgbE gene, sgbU gene, sgbH gene, lyxK gene, avtA gene, malS gene, bax gene, xylR gene, xylH gene, xylG gene, xylF gene, xylA gene, xylB gene, glyQ gene, glyS gene, hokA gene, cspA gene, tiaE gene, bisC gene, tag gene, eptB gene, proK gene, dppA gene, dppB gene, dppC gene, dppD gene, dppF gene, rdlD gene, ldrD gene, bcsG gene, bcsF gene, bcsE gene, bcsA gene, bcsB gene, bcsZ gene, bcsC gene, dctA gene, kdgK gene, treF gene, gadA gene, gadX gene, gadY gene, gadW gene, mdtF gene, mdtE gene, gadE gene, hdeD gene, hdeA gene, hdeB gene, slp gene, arsC gene, arsB gene, arsR gene, gor gene, prlC gene, uspA gene, pitA gene, nikR gene, nikE gene, nikD gene, nikC gene, nikB gene, nikA gene, acpT gene, dcrB gene, zntA gene, ftsY gene, ftsE gene, ftsX gene, rpoH gene, livJ gene, livK gene, livH gene, livM gene, livG gene, livF gene, ugpB gene, ugpA gene, ugpE gene, ugpC gene, ugpQ gene, ggt gene, gntR gene, gntK gene, gntU gene, asd gene, glgB gene, glgX gene, gigC gene, glgA gene, glgP gene, gipD gene, glpE gene, gipG gene, glpR gene, rtcR gene, rtcB gene, rtcA gene, malT gene, malP gene, malQ gene, gntT gene, gntY gene, gntX gene, bioH gene, feoB gene, feoA gene, greB gene, ompR gene, envZ gene, pck gene, hslO gene, hslR gene, nudE gene, mrcA gene, hofQ gene, aroK gene, aroB gene, damX gene, dam gene, rpe gene, gph gene, trpS gene, cysG gene, nirC gene, nirD gene, nirB gene, tsgA gene, ppiA gene, fic gene, pabA gene, argD gene, crp gene, prkB gene, kefG gene, kefB gene, slyD gene, slyX gene, fkpA gene, rpsL gene, rpsG gene, fusA gene, tufA gene, rpsJ gene, rplC gene, rplD gene, rplW gene, rplB gene, rpsS gene, rplV gene, rpsC gene, rplP gene, rpmC gene, rpsQ gene, rplN gene, rplX gene, rplE gene, rpsN gene, rpsH gene, rplF gene, rplR gene, rpsE gene, rpmD gene, rplO gene, secY gene, rpmJ gene, rpsM gene, rpsK gene, rpsD gene, rpoA gene, rplQ gene, zntR gene, mscL gene, trkA gene, rsmB gene, fmt gene, def gene, smf gene, smg gene, aroE gene, rrsE gene, ileU gene, alaU gene, rrlE gene, rrfE gene, metA gene, aceB gene, aceA gene, aceK gene, arpA gene, iclR gene, metH gene, pepE gene, lysC gene, pgi gene, ubiC gene, ubiA gene, plsB gene, dgkA gene, lexA gene, dinF gene, zur gene, qor gene, dnaB gene, alr gene, tyrB gene, aphA gene, uvrA gene, ssb gene, soxS gene, soxR gene, ryjA gene, actP gene, acs gene, nrfA gene, nrfB gene, nrfC gene, nrfD gene, nrfE gene, nrfF gene, nrfG gene, gltP gene, fdhF gene, rpiR gene, rpiB gene, proP gene, basS gene, basR gene, eptA gene, adiC gene, adiY gene, adiA gene, melR gene, melA gene, melB gene, fumB gene, dcuB gene, dcuR gene, dcuS gene, lysU gene, cadA gene, cadB gene, cadC gene, pheU gene, dipZ gene, cutA gene, dcuA gene, aspA gene, fxsA gene, groS gene, groL gene, efp gene, ecnA gene, ecnB gene, sugE gene, blc gene, ampC gene, frdD gene, frdC gene, frdB gene, frdA gene, poxA gene, psd gene, rsgA gene, orn gene, glyV gene, glyX gene, glyY gene, amiB gene, mutL gene, miaA gene, hfq gene, hflX gene, hflK gene, hflC gene, purA gene, rnr gene, rlmB gene, ulaF gene, rpsF gene, priB gene, rpsR gene, rplI gene, fklB gene, cycA gene, cpdB gene, cysQ gene, msrA gene, chpS gene, chpB gene, ppa gene, fbp gene, mpl gene, pmbA gene, cybC gene, nrdG gene, nrdD gene, treC gene, treB gene, treR gene, mgtA gene, pyrI gene, pyrB gene, pyrL gene, argI gene, valS gene, holC gene, pepA gene, idnR gene, idnT gene, idnO gene, idnD gene, idnK gene, leuX gene, dnaC gene, dnaT gene, bglJ gene, fhuF gene, leuV gene, leuP gene, leuQ gene, rsmC gene, holD gene, rimI gene, prfC gene, osmY gene, deoC gene, deoA gene, deoB gene, deoD gene, lplA gene, serB gene, radA gene, nadR gene, slt gene, trpR gene, rob gene, creA gene, creB gene, creC gene, creD gene, arcA gene or homologous gene thereof
[0151] [2] fhuA gene, fhuC gene, fhuD gene, fhuB gene, yafJ gene, yafK gene, yafQ gene, dinJ gene, yafL gene, yafM gene, fhiA gene, mbhA gene, dinB gene, yafN gene, yafO gene, yafP gene, ykfJ gene, prfH gene, yagP gene, yagQ gene, yagR gene, yagS gene, yagT gene, yagU gene, ykgJ gene, yagV gene, yagW gene, yagX gene, yagY gene, yagZ gene, ykgK gene, ykgL gene, ykgM(JW5034) gene, ykgM(JW5035) gene, eaeH gene, ykgA gene, ykgB gene, ykgI gene, ykgC gene, ykgD gene, ykgE gene, ykgF gene, ykgG gene, ykgH gene, betA gene, betB gene, betI gene, betT gene, yahA gene, yahB gene, yahC gene, yahD gene, yahE gene, yahF gene, yahG gene, yahH gene, yahI gene, yahJ gene, yahK gene, yahL gene, yahM gene, yahN gene, yahO gene, prpR gene, prpB gene, prpC gene, prpD gene, prpE gene, codB gene, codA gene, cynR gene, cynT gene, cynS gene, cynX gene, lacA gene, lacY gene, lacZ gene, lacI gene, mhpR gene, mhpA gene, mhpB gene, mhpC gene, mhpD gene, mhpF gene, mhpE gene, mhpT gene, yaiL gene, frmB gene, frmA gene, frmR gene, yaiO gene, yaiX gene, yaiF gene, yaiP gene, yaiS gene, tauA gene, tauB gene, tauC gene, tauD gene, yaiT gene, yaiU gene, yaiV gene, ampH gene, sbmA gene, yaiW gene, yaiY gene, yaiZ gene, ddlA gene, yaiB gene, phoA gene, psiF gene, yaiC gene, ybbO gene, tesA gene, ybbA gene, ybbP gene, ylbG gene, ybbB gene, ybbS gene, allA gene, allR gene, glxR gene, ybbV gene, ybbW gene, allB gene, ybbY gene, glxK gene, ylbA gene, allC gene, allD gene, fdrA gene, ylbE_{—}1 gene, ylbE_{—}2 gene, ylbF gene, ybcF gene, envY gene, ybcH gene, nfrA gene, nfrB gene, cusS gene, cusR gene, cusC gene, cusF gene, cusB gene, cusA gene, pheP gene, ybdG gene, nfnB gene, ybdF gene, ybdJ gene, ybdK gene, hokE gene, ybeL gene, ybeQ gene, ybeR gene, djiB gene, ybeT gene, ybeU gene, djlC gene, hscC gene, rihA gene, gitL gene, gltK gene, gltJ gene, gltI gene, kdpF gene, ybfA gene, ybgA gene, phr gene, ybiA gene, dinG gene, ybiB gene, ybiC gene, ybiJ gene, ybiI gene, ybiX gene, fiu gene, ybiM gene, ybiN gene, ybiO gene, glnQ gene, glnP gene, glnH gene, yliA gene, yliB gene, yliC gene, yliD gene, yliE gene, yliF gene, yliG gene, yliH gene, yliI gene, yliJ gene, dacC gene, deoR gene, ybjG gene, ybjC gene, nfsA gene, rimK gene, ybjN gene, potF gene, potG gene, potH gene, potI gene, ybjO gene, rumB gene, artJ gene, artM gene, artQ gene, artI gene, artP gene, ybjP gene, ybjQ gene, ybjR gene, ybjS gene, ybjT gene, ltaE gene, ymcC gene, ymcD gene, cspH gene, cspG gene, ymcE gene, gnsA gene, yccM gene, torS gene, torT gene, torR gene, torC gene, torA gene, torD gene, cbpM gene, cbpA gene, yccE gene, agp gene, yccJ gene, wrbA gene, ymdF gene, ycdG gene, ycdH gene, ycdI gene, rarA gene, ycdK gene, ycdL gene, ycdM gene, ycdC gene, putA gene, putP gene, ycdN_{—}1 gene, ycdN_{—}2 gene, ycdO gene, ycdB gene, phoH gene, ycdP gene, ycdQ gene, ycdR gene, ycdS gene, ycdT gene, ymdE gene, ycdU gene, elbA gene, ycgX gene, ycgE gene, ycgF gene, ycgZ gene, ymgA gene, ymgB gene, ymgC gene, ycgG gene, ymgF gene, ycgH_{—}1 gene, ycgH_{—}2 gene, ymgD gene, ymgG gene, ymgH gene, ycgI gene, ydfH gene, ydfZ gene, ydfI gene, ydfJ gene, yecT gene, flhE gene, flhA gene, flhB gene, cheZ gene, cheY gene, cheB gene, cheR gene, tap gene, tar gene, cheW gene, cheA gene, motB gene, motA gene, flhC gene, flhD gene, yecG gene, otsA gene, otsB gene, araH gene, araG gene, araF gene, yecI gene, yecJ gene, isrB gene, yecR gene, ftn gene, yecH gene, tyrP gene, uvrC gene, uvrY gene, yecF gene, sdiA gene, yecC gene, yecS gene, yedO gene, fliY gene, fliZ gene, fliA gene, fliC gene, fliD gene, fliS gene, fliT gene, amyA gene, yedD gene, yedE gene, yedF gene, yedK gene, yedL gene, yedN_{—}2 gene, yedN_{—}1 gene, yedM gene, intG gene, fliE gene, fliF gene, fliG gene, fliH gene, fliI gene, fliJ gene, fliK gene, fliL gene, fliM gene, fliN gene, fliO gene, fliP gene, fliQ gene, fliR gene, rcsA gene, dsrB gene, yodD gene, yedA gene, vsr gene, dcm gene, yedJ gene, yedR gene, yedS_{—}1 gene, yedS_{—}2 gene, yedS_{—}3 gene, hchA gene, yedV gene, yedW gene, yedX gene, yedY gene, yedZ gene, yodA gene, wbbL_{—}2 gene, wbbL_{—}1 gene, wbbK gene, wbbJ gene, wbbI gene, wbbH gene, glf gene, rfbX gene, rfbC gene, rfbA gene, rfbD gene, rfbB gene, yegE gene, alkA gene, yegD gene, yegI gene, yegJ gene, yegK gene, yegL gene, ryeC gene, ryeD gene, mdtA gene, mdtB gene, mdtC gene, mdtD gene, baeS gene, baeR gene, yegP gene, yegQ gene, ryeE gene, ogrK gene, yegZ gene, yegR gene, yegS gene, gatR_{—}1 gene, gatR_{—}2 gatD gene, gatC gene, gatB gene, gatA gene, gatZ gene, gatY gene, fbaB gene, yegT gene, yegU gene, yegV gene, yegW gene, yegX gene, molR_{—}1 gene, molR_{—}2 gene, molR_{—}3 gene, yehI gene, yehK gene, yehL gene, yehM gene, yehP gene, yehQ gene, yehR gene, yehS gene, yehT gene, yehU gene, mlrA gene, yohO gene, yehW gene, yehX gene, yehY gene, yehZ gene, bglX gene, dld gene, pbpG gene, yohC gene, yeiL gene, yeiJ gene, rihB gene, yeiL gene, yeiM gene, yeiN gene, yeiC gene, elaB gene, elaA gene, elaC gene, elaD gene, yfbK gene, yfbL gene, yfbM gene, yfbn gene, yfbO gene, yfbP gene, yfcC gene, yfcD gene, yfcE gene, yfcF gene, yfcG gene, folX gene, yfcH gene, yfcI gene, hisP gene, hisM gene, hisQ gene, hisJ gene, argT gene, ypdA gene, ypdB gene, ypdC gene, ypdD gene, ypdE gene, ypdF gene, ypdG gene, ypdH gene, pinH gene, ypjB gene, ypjC gene, ileY gene, ygaQ gene, ygaR gene, yqaC gene, yqaD gene, ygaT gene, csiR gene, ygaU gene, yqaE gene, ygaV gene, ygaP gene, stpA gene, ygaW gene, ygaC gene, ygaM gene, nrdH gene, nrdI gene, nrdE gene, proV gene, proW gene, proX gene, ygaX gene, ygaY gene, ygaZ gene, ygaH gene, srlA gene, srlE gene, srlB gene, srlD gene, gutM gene, srlR gene, gutQ gene, yqeG gene, yqeH gene, yqeI gene, yqeJ gene, yqeK gene, ygeF gene, ygeG gene, ygeH gene, ygeI gene, pbl gene, ygeK gene, ygeL gene, ygeM gene, ygeN gene, ygeO gene, ygeP gene, ygeQ gene, glyU gene, ygeR gene, xdhA gene, xdhB gene, xdhC gene, ygeV gene, ygeW gene, ygeX gene, ygeY gene, hyuA gene, yqeA gene, yqeB gene, yqeC gene, ygfJ gene, ygfK gene, ssnA gene, ygfM gene, xdhD gene, ygfO gene, guaD gene, ygfQ gene, ygfS gene, ygfT gene, ygfU gene, idi gene, cmtA gene, cmtB gene, yghD gene, yghE gene, yghF gene, yghG gene, pppA gene, yghJ gene, yghK gene, glcB gene, glcG gene, glcF gene, gicE gene, glcD gene, glcC gene, yghO gene, yghQ gene, yghR gene, yghS gene, yghT gene, ygiS gene, ygiT gene, ygiU gene, ygiV gene, ygiW gene, qseB gene, qseC gene, ygiZ gene, mdaB gene, ygiN gene, gltF gene, yhcA gene, yhcD gene, yhcE gene, yhcF gene, yhcG gene, yhcH gene, nanK gene, nanE gene, yhdJ gene, yhdU gene, envR gene, acrE gene, acrF gene, yhdV gene, yhdW gene, yhdX gene, yhdY gene, yijP gene, yijO gene, frwD gene, pflC gene, pflD gene, frwB gene, frwC gene, ptsA gene, rhaT gene, rhaR gene, rhaS gene, rhaB gene, rhaA gene, rhaD gene, yiiL gene, frvA gene, frvB gene, frvX gene, frvR gene, yiiG gene, yiiF gene, yiiE gene, yiiD gene, dtd gene, rbn gene, yihX gene, yihW gene, yihV gene, yihU gene, yihT gene, yihS gene, yihR gene, yihQ gene, yihP gene, yihO gene, ompL gene, yihN gene, yihM gene, yihL gene, hsrA gene, rbsR gene, rbsK gene, rbsB gene, rbsC gene, rbsA gene, rbsD gene, trkD gene, yieN gene, yieM gene, asnA gene, yidB gene, yidA gene, yidX gene, dgoR gene, dgoK gene, dgoA gene, dgoD gene, dgoT gene, cbrA gene, yidR gene, yidQ gene, yidE gene, yidP gene, glvC gene, glvB gene, glvG gene, ysdC gene, yidL gene, yidK gene, yidJ gene, yidI gene, yidH gene, yidG gene, yidF gene, yhiN gene, yhiM gene, yhiL gene, yhiK gene, yhiJ gene, yhiI gene, rbbA gene, yhhJ gene, chiA gene, bfd gene, bfr gene, gspO gene, gspM gene, gspL gene, gspK gene, gspJ gene, gspI gene, gspH gene, gspG gene, gspF gene, gspE gene, gspD gene, gspC gene, gspA gene, pioO gene, yjbE gene, yjbF gene, yjbG gene, yjbH gene, yjbA gene, xylE gene, malG gene, malF gene, malE gene, malK gene, lamB gene, malM gene, yjbI gene, yjcP gene, yjcQ gene, yjcR gene, yjcS gene, alsK gene, alsE gene, alsC gene, alsA gene, alsB gene, yjdP gene, phnP gene, phnO gene, phnN gene, phnM gene, phnL gene, phnK gene, phnJ gene, phnI gene, phnH gene, phnG gene, phnF gene, phnE(JW4064) gene, phnE(JW4065) gene, phnD gene, phnC gene, phnB gene, phnA gene, yjdA gene, yjcZ gene, yjfI gene, yjfJ gene, yjfK gene, yjfL gene, yjfM gene, yjfC gene, aidB gene, yjfN gene, yjfO gene, yjfP gene, ulaR gene, ulaG gene, ulaA gene, ulaB gene, ulaC gene, ulaD gene, ulaE gene, yjhS gene, yjhT gene, yjhA gene, fimB gene, fimE gene, fimA gene, fimI gene, fimC gene, fimD gene, fimF gene, fimG gene, fimH gene, gntP gene, uxuA gene, uxuB gene, uxuR gene, yjiC gene, yjiD gene, yjiE gene, iadA gene, yjiG gene, yjiH gene, kptA gene, yjiJ gene, yjiK gene, yjiL gene, yjiM gene, yjiN gene, yjiO gene, yjiP gene, yjiQ gene, yjiR gene, yjiS gene, yjiT gene, yjiV gene, mcrC gene, mcrB gene, yjiW gene, hsdS gene, hsdM gene, hsdR gene, mrr gene, yjiA gene, yjiX gene, yjiY gene, tsr gene, yjiZ gene, yjjM gene, yjjN gene, mdoB gene, yjjA gene or homologous gene thereof. When the above gene [1] or homologous gene thereof comprises genes that wild-type E. coli strains do not originally contain (hereafter referred to as “NC genes”), however, chromosomal DNA of the aforementioned E. coli mutant strain derived from the wild-type E. coli strain does not necessarily have the NC gene.

[0152] A preferable example of the E. coli mutant strain of the present invention is an E. coli mutant strain comprising chromosomal DNA that comprises DNA consisting of the nucleotide sequence of the genes of Table 1 and the above-mentioned [1] in the nucleotide sequences shown in SEQ ID NO: 1 or a DNA equivalent thereto, does not contain DNA consisting of the nucleotide sequence of chpA gene or DNA equivalent thereto, and does not contain DNA consisting of the nucleotide sequences of [3] chpA gene, uspG gene, ybdR gene, rnk gene, rna gene, citT gene, citG gene, citX gene, citF gene, citE gene, citD gene, citC gene, citA gene, citB gene, dcuC gene, crcA gene, cspE gene, crcB gene, ybeH gene, ybeM gene, yqcA gene, yqcB gene, yqcC gene, syd gene, yqcD gene, ygdH gene, sdaC gene, sdaB gene, exo gene, fucO gene, fucA gene, fucP gene, fucI gene, fucK gene, fucU gene, fucR gene, ygdE gene, ygdD gene, gcvA gene, ygdI gene, csdA gene, ygdK gene, araD gene, araA gene, araB gene, araC gene, yabI gene, thiQ gene, thiP gene, tbpA gene, sgrR gene, setA gene, yhfZ gene, yhfY gene, yhfX gene, yhfW gene, php gene, yhfU gene, yhfT gene, yhfS gene, frlR gene, frlD gene, frlC gene, frlB gene, frlA gene, yhfL gene, pncA gene, ydjE gene, ydjF gene, ydjG gene, ydjH gene, ydjI gene, ydjJ gene, ydjK gene, ydjL gene, yeaC gene, yeaA gene, ade gene, yicO gene, yicN gene, yicM gene, yicS gene, nlpA gene, yicL gene, setC gene, ygjI gene, ygjJ gene, ygjK gene, fadH gene, ygjM gene, ygjN gene, ygjO gene, ygjP gene, ygjQ gene, ygjR gene, alx gene, sstT gene, ygjV gene, yrhB gene, yrhA gene, yhhZ gene, yhhY gene, yhhX gene, yhhW gene, yeaK gene, yoaI gene, yeaL gene, yeaM gene, yeaN gene, yeaO gene, yoaF gene, yeaP gene, yeaQ gene, yoaG gene, yeaR gene, yeaS gene, yeaT gene, yeaU gene, yeaV gene, yeaW gene, yeaX gene, hyfA gene, hyfB gene, hyfC gene, hyfD gene, hyfE gene, hyfF gene, hyfG gene, hyfH gene, hyfI gene, hyfJ gene, hyfR gene, focB gene or homologous gene thereof, or DNA equivalent thereto. More preferred is
[0153] (2) the E. coli mutant strain according to above (1) comprising chromosomal DNA that comprises DNA consisting of the nucleotide sequences as shown in [1] to [83] below of the nucleotide sequence as shown in SEQ ID NO: 1 or DNA equivalent thereto:
[0154] [1] a nucleotide sequence of nucleotides 1 to 15298
[0155] [2] a nucleotide sequence of nucleotides 16751 to 19620
[0156] [3] a nucleotide sequence of nucleotides 20815 to 65857
[0157] [4] a nucleotide sequence of nucleotides 78797 to 167400
[0158] [5] a nucleotide sequence of nucleotides 173316 to 244300
[0159] [6] a nucleotide sequence of nucleotides 253747 to 262299
[0160] [7] a nucleotide sequence of nucleotides 387868 to 389474
[0161] [8] a nucleotide sequence of nucleotides 404040 to 518365
[0162] [9] a nucleotide sequence of nucleotides 533048 to 535840
[0163] [10] a nucleotide sequence of nucleotides 550552 to 564276
[0164] [11] a nucleotide sequence of nucleotides 608455 to 640668
[0165] [12] a nucleotide sequence of nucleotides 659193 to 675439
[0166] [13] a nucleotide sequence of nucleotides 689711 to 729156
[0167] [14] a nucleotide sequence of nucleotides 739930 to 832888
[0168] [15] a nucleotide sequence of nucleotides 848427 to 867974
[0169] [16] a nucleotide sequence of nucleotides 883811 to 891334
[0170] [17] a nucleotide sequence of nucleotides 909717 to 1049224
[0171] [18] a nucleotide sequence of nucleotides 1097358 to 1105534
[0172] [19] a nucleotide sequence of nucleotides 1106991 to 1196528
[0173] [20] a nucleotide sequence of nucleotides 1225485 to 1295721
[0174] [21] a nucleotide sequence of nucleotides 1297023 to 1300822
[0175] [22] a nucleotide sequence of nucleotides 1302896 to 1397636
[0176] [23] a nucleotide sequence of nucleotides 1399079 to 1413662
[0177] [24] a nucleotide sequence of nucleotides 1436899 to 1469664
[0178] [25] a nucleotide sequence of nucleotides 1472404 to 1504839
[0179] [26] a nucleotide sequence of nucleotides 1506619 to 1528866
[0180] [27] a nucleotide sequence of nucleotides 1534766 to 1630050
[0181] [28] a nucleotide sequence of nucleotides 1654610 to 1853604
[0182] [29] a nucleotide sequence of nucleotides 1864144 to 1875287
[0183] [30] a nucleotide sequence of nucleotides 1888500 to 1963662
[0184] [31] a nucleotide sequence of nucleotides 1992215 to 1995800
[0185] [32] a nucleotide sequence of nucleotides 2027349 to 2032587
[0186] [33] a nucleotide sequence of nucleotides 2043516 to 2068287
[0187] [34] a nucleotide sequence of nucleotides 2081066 to 2103531
[0188] [35] a nucleotide sequence of nucleotides 2115204 to 2145402
[0189] [36] a nucleotide sequence of nucleotides 2186995 to 2199807
[0190] [37] a nucleotide sequence of nucleotides 2228990 to 2255033
[0191] [38] a nucleotide sequence of nucleotides 2262631 to 2292234
[0192] [39] a nucleotide sequence of nucleotides 2293834 to 2324498
[0193] [40] a nucleotide sequence of nucleotides 2322075 to 2411311
[0194] [41] a nucleotide sequence of nucleotides 2413007 to 2422503
[0195] [42] a nucleotide sequence of nucleotides 2433238 to 2471990
[0196] [43] a nucleotide sequence of nucleotides 2482140 to 2504213
[0197] [44] a nucleotide sequence of nucleotides 2513697 to 2519690
[0198] [45] a nucleotide sequence of nucleotides 2521089 to 2599856
[0199] [46] a nucleotide sequence of nucleotides 2613439 to 2754814
[0200] [47] a nucleotide sequence of nucleotides 2788619 to 2794311
[0201] [48] a nucleotide sequence of nucleotides 2800029 to 2803445
[0202] [49] a nucleotide sequence of nucleotides 2809286 to 2824451
[0203] [50] a nucleotide sequence of nucleotides 2829399 to 2909409
[0204] [51] a nucleotide sequence of nucleotides 2909710 to 2921193
[0205] [52] a nucleotide sequence of nucleotides 2943639 to 2984497
[0206] [53] a nucleotide sequence of nucleotides 3032267 to 3076223
[0207] [54] a nucleotide sequence of nucleotides 3078056 to 3109245
[0208] [55] a nucleotide sequence of nucleotides 3133480 to 3164769
[0209] [56] a nucleotide sequence of nucleotides 3172082 to 3184621
[0210] [57] a nucleotide sequence of nucleotides 3186056 to 3224889
[0211] [58] a nucleotide sequence of nucleotides 3240401 to 3261074
[0212] [59] a nucleotide sequence of nucleotides 3262220 to 3361080
[0213] [60] a nucleotide sequence of nucleotides 3370892 to 3411501
[0214] [61] a nucleotide sequence of nucleotides 3421222 to 3486426
[0215] [62] a nucleotide sequence of nucleotides 3496906 to 3536155
[0216] [63] a nucleotide sequence of nucleotides 3549687 to 3556477
[0217] [64] a nucleotide sequence of nucleotides 3576239 to 3697304
[0218] [65] a nucleotide sequence of nucleotides 3709527 to 3742812
[0219] [66] a nucleotide sequence of nucleotides 3744293 to 3748980
[0220] [67] a nucleotide sequence of nucleotides 3747997 to 3750486
[0221] [68] a nucleotide sequence of nucleotides 3751906 to 3762908
[0222] [69] a nucleotide sequence of nucleotides 3772817 to 3774086
[0223] [70] a nucleotide sequence of nucleotides 3785257 to 3794687
[0224] [71] a nucleotide sequence of nucleotides 3803459 to 3868134
[0225] [72] a nucleotide sequence of nucleotides 3878460 to 3918087
[0226] [73] a nucleotide sequence of nucleotides 3919815 to 3986454
[0227] [74] a nucleotide sequence of nucleotides 3988342 to 4003004
[0228] [75] a nucleotide sequence of nucleotides 4021347 to 4055371
[0229] [76] a nucleotide sequence of nucleotides 4061466 to 4128290
[0230] [77] a nucleotide sequence of nucleotides 4141016 to 4170562
[0231] [78] a nucleotide sequence of nucleotides 4186909 to 4239493
[0232] [79] a nucleotide sequence of nucleotides 4255871 to 4303000
[0233] [80] a nucleotide sequence of nucleotides 4316735 to 4318540
[0234] [81] a nucleotide sequence of nucleotides 4334946 to 4414758
[0235] [82] a nucleotide sequence of nucleotides 4428378 to 4501437
[0236] [83] a nucleotide sequence of nucleotides 4604873 to 4646332.
[0237] (3) The E. coli mutant strain according to (1) or (2) above comprising chromosomal DNA that does not comprise uspG gene, ybdR gene, rnk gene, rna gene, citT gene, citG gene, citX gene, citF gene, citE gene, citD gene, citC gene, citA gene, citB gene, dcuC gene, crcA gene, cspE gene, crcB gene, ybeH gene, and ybeM gene, or homologous gene thereof and comprises chpA gene or homologous gene thereof.
[0238] (4) The E. coli mutant strain according to any one of (1) to (3) above comprising chromosomal DNA that does not comprise DNA consisting of a nucleotide sequence of nucleotides 640669 to 659192 in the nucleotide sequence as shown in SEQ ID NO: 1 or DNA equivalent thereto.
[0239] (5) The E. coli mutant strain according to any one of (1) to (4) above comprising chromosomal DNA that does not comprise yqcA gene, yqcB gene, yqcC gene, syd gene, yqcD gene, ygdH gene, sdaC gene, sdaB gene, exo gene, fucO gene, fucA gene, fucP gene, fucI gene, fucK gene, fucU gene, fucR gene, ygdE gene, ygdD gene, gcvA gene, ygdI gene, csdA gene, and ygdK gene, or homologous gene thereof.
[0240] (6) The E. coli mutant strain according to any one of (1) to (5) above comprising chromosomal DNA that does not comprise DNA consisting of a nucleotide sequence of nucleotides 2921194 to 2943638 in the nucleotide sequence as shown in SEQ ID NO: 1 or DNA equivalent thereto.
[0241] (7) The E. coli mutant strain according to any one of (1) to (6) above comprising chromosomal DNA that does not comprise araD gene, araA gene, araB gene, araC gene, yabI gene, thiQ gene, thiP gene, tbpA gene, sgrR gene, and setA gene, or homologous gene thereof.
[0242] (8) The E. coli mutant strain according to any one of (1) to (7) above comprising chromosomal DNA that does not comprise DNA consisting of a nucleotide sequences of nucleotides 65858 to 78796 in the nucleotide sequence as shown in SEQ ID NO: 1 or DNA equivalent thereto.
[0243] (9) The E. coli mutant strain according to any one of (1) to (8) above comprising chromosomal DNA that does not comprise yhfZ gene, yhfY gene, yhfX gene, yhfW gene, php gene, yhfU gene, yhfT gene, yhfS gene, frlR gene, frlD gene, frlC gene, frlB gene, frlA gene, and yhfL gene or homologous gene thereof.
[0244] (10) The E. coli mutant strain according to any one of (1) to (9) above comprising chromosomal DNA that does not comprise DNA consisting of a nucleotide sequence of nucleotides 4128291 to 4141015 in the nucleotide sequence as shown in SEQ ID NO: 1 or DNA equivalent thereto.
[0245] (11) The E. coli mutant strain according to any one of (1) to (10) above comprising chromosomal DNA that does not comprise pncA gene, ydjE gene, ydjF gene, ydjG gene, ydjH gene, ydjI gene, ydjJ gene, ydjK gene, ydjL gene, yeaC gene, and yeaA gene, or homologous gene thereof.
[0246] (12) The E. coli mutant strain according to any one of (1) to (11) above comprising chromosomal DNA that does not comprise DNA consisting of a nucleotide sequence of nucleotides 1853605 to 1864143 in the nucleotide sequence as shown in SEQ ID NO: 1 or DNA equivalent thereto.
[0247] (13) The E. coli mutant strain according to any one of (1) to (12) above comprising chromosomal DNA that does not comprise ade gene, yicO gene, yicN gene, yicM gene, yicS gene, nlpA gene, yicL gene, and setC gene, or homologous gene thereof.
[0248] (14) The E. coli mutant strain according to any one of (1) to (13) above comprising chromosomal DNA that does not comprise DNA consisting of a nucleotide sequence of nucleotides 3794688 to 3803458 in the nucleotide sequence as shown in SEQ ID NO: 1 or DNA equivalent thereto.
[0249] (15) The E. coli mutant strain according to any one of (1) to (14) above comprising chromosomal DNA that does not comprise ygjI gene, ygjJ gene, ygjK gene, fadH gene, ygjM gene, ygjN gene, ygjO gene, ygjP gene, ygjQ gene, ygjR gene, alx gene, sstT gene, and ygjV gene, or homologous gene thereof.
[0250] (16) The E. coli mutant strain according to any one of (1) to (15) above comprising chromosomal DNA that does not comprise DNA consisting of a nucleotide sequence of nucleotides 3224890 to 3240400 in the nucleotide sequence as shown in SEQ ID NO: 1 or DNA equivalent thereto.
[0251] (17) The E. coli mutant strain according to any one of (1) to (16) above comprising chromosomal DNA that does not comprise yrhB gene, yrhA gene, yhhZ gene, yhhY gene, yhhX gene, and yhhW gene, or homologous gene thereof.
[0252] (18) The E. coli mutant strain according to any one of (1) to (17) above comprising chromosomal DNA that does not comprise DNA consisting of a nucleotide sequence of nucleotides 4055372 to 4061465 in the nucleotide sequence as shown in SEQ ID NO: 1 or DNA equivalent thereto.
[0253] (19) The E. coli mutant strain according to any one of (1) to (18) above comprising chromosomal DNA that does not comprise yeaK gene, yoaI gene, yeaL gene, yeaM gene, yeaN gene, yeaO gene, yoaF gene, yeaP gene, yeaQ gene, yoaG gene, yeaR gene, yeaS gene, yeaT gene, yeaU gene, yeaV gene, yeaW gene, and yeaX gene, or homologous gene thereof.
[0254] (20) The E. coli mutant strain according to any one of (1) to (19) above comprising chromosomal DNA that does not comprise DNA consisting of a nucleotide sequence of nucleotides 1875288 to 1888499 in the nucleotide sequence as shown in SEQ ID NO: 1 or DNA equivalent thereto.
[0255] (21) The E. coli mutant strain according to any one of (1) to (20) above comprising chromosomal DNA that does not comprise hyfA gene, hyfB gene, hyfC gene, hyfD gene, hyfE gene, hyfF gene, hyfG gene, hyfH gene, hyfI gene, hyfJ gene, hyfR gene, and focB gene, or homologous gene thereof.
[0256] (22) The E. coli mutant strain according to any one of (1) to (21) above comprising chromosomal DNA that does not comprise DNA consisting of a nucleotide sequence of nucleotides 2599857 to 2613438 in the nucleotide sequence as shown in SEQ ID NO: 1 or DNA equivalent thereto.

TABLE 1

| | | Start number in | Stop number in |
|---|---|---|---|
| | | SEQ ID NO: | SEQ ID NO: |
| | | 1 (stop number | 1 (start number |
| | | when encoded by | when encoded by |
| | Coding | complementary | complementary |
| Gene name | strand | strand) | strand) |
| thrL | | 190 | 255 |
| thrA | | 337 | 2799 |
| thrB | | 2801 | 3733 |
| thrC | | 3734 | 5020 |
| yaaX | | 5234 | 5530 |
| yaaA | Complementary | 5683 | 6459 |
| | strand | | |
| yaaJ | Complementary | 6529 | 7959 |
| | strand | | |
| talB | | 8238 | 9191 |
| mog | | 9306 | 9893 |
| yaaH | Complementary | 9928 | 10494 |
| | strand | | |
| yaaW | Complementary | 10643 | 11356 |
| | strand | | |
| htgA | | 10830 | 11315 |
| yaaI | Complementary | 11382 | 11786 |
| | strand | | |
| dnaK | | 12163 | 14079 |
| dnaJ | | 14168 | 15298 |
| insL-1 | | 15445 | 16557 |
| mokC | Complementary | 16751 | 16960 |
| | strand | | |
| hokC | Complementary | 16751 | 16903 |
| | strand | | |
| sokC | | 16952 | 17006 |
| nhaA | | 17489 | 18655 |
| nhaR | | 18715 | 19620 |
| insB-1 | Complementary | 19811 | 20314 |
| | strand | | |
| insA-1 | Complementary | 20233 | 20508 |
| | strand | | |
| rpsT | Complementary | 20815 | 21078 |
| | strand | | |
| yaaY | | 21181 | 21399 |
| ribF | | 21407 | 22348 |
| ileS | | 22391 | 25207 |
| lspA | | 25207 | 25701 |
| fkpB | | 25826 | 26275 |
| ispH | | 26277 | 27227 |
| rihC | | 27293 | 28207 |
| dapB | | 28374 | 29195 |
| carA | | 29651 | 30799 |
| carB | | 30817 | 34038 |
| caiF | | 34300 | 34695 |
| caiE | Complementary | 34781 | 35371 |
| | strand | | |
| caiD | Complementary | 35377 | 36270 |
| | strand | | |
| caiC | Complementary | 36271 | 37839 |
| | strand | | |
| caiB | Complementary | 37898 | 39115 |
| | strand | | |
| caiA | Complementary | 39244 | 40386 |
| | strand | | |
| caiT | Complementary | 40417 | 41931 |
| | strand | | |
| fixA | | 42403 | 43173 |
| fixB | | 43188 | 44129 |
| fixC | | 44180 | 45466 |
| fixX | | 45463 | 45750 |
| yaaU | | 45807 | 47138 |
| kefF | | 47246 | 47776 |
| kefC | | 47769 | 49631 |
| folA | | 49823 | 50302 |
| apaH | Complementary | 50380 | 51222 |
| | strand | | |
| apaG | Complementary | 51229 | 51606 |
| | strand | | |
| ksgA | Complementary | 51609 | 52430 |
| | strand | | |
| pdxA | Complementary | 52427 | 53416 |
| | strand | | |
| surA | Complementary | 53416 | 54702 |
| | strand | | |
| lmp | Complementary | 54755 | 57109 |
| | strand | | |
| djlA | | 57364 | 58179 |
| yabP | | 58474 | 59124 |
| yabQ | | 59121 | 59279 |
| rluA | Complementary | 59687 | 60346 |
| | strand | | |
| hepA | Complementary | 60358 | 63264 |
| | strand | | |
| polB | Complementary | 63429 | 65780 |
| | strand | | |
| araD | Complementary | 65855 | 66550 |
| | strand | | |
| araA | Complementary | 66835 | 68337 |
| | strand | | |
| araB | Complementary | 68348 | 70048 |
| | strand | | |
| araC | | 70387 | 71265 |
| yabI | | 71351 | 72115 |
| thiQ | Complementary | 72229 | 72927 |
| | strand | | |
| thiP | Complementary | 72911 | 74521 |
| | strand | | |
| tbpA | Complementary | 74497 | 75480 |
| | strand | | |
| sgrR | Complementary | 75644 | 77299 |
| | strand | | |
| sgrS | | 77367 | 77593 |
| setA | | 77621 | 78799 |
| leuD | Complementary | 78848 | 79453 |
| | strand | | |
| leuC | Complementary | 79464 | 80864 |
| | strand | | |
| leuB | Complementary | 80867 | 81958 |
| | strand | | |
| leuA | Complementary | 81958 | 83529 |
| | strand | | |
| leuL | Complementary | 83622 | 83708 |
| | strand | | |
| leuO | | 84368 | 85312 |
| ilvI | | 85630 | 87354 |
| ilvH | | 87357 | 87848 |
| fruR | | 88028 | 89032 |
| mraZ | | 89634 | 90092 |
| mraW | | 90094 | 91035 |
| ftsL | | 91032 | 91397 |
| ftsI | | 91413 | 93179 |
| murE | | 93166 | 94653 |
| murF | | 94650 | 96008 |
| mraY | | 96002 | 97084 |
| murD | | 97087 | 98403 |
| ftsW | | 98403 | 99647 |
| murG | | 99644 | 100711 |
| murC | | 100765 | 102240 |
| ddlB | | 102233 | 103153 |
| ftsQ | | 103155 | 103985 |
| ftsA | | 103982 | 105244 |
| ftsZ | | 105305 | 106456 |
| lpxC | | 106557 | 107474 |
| secM | | 107705 | 108217 |
| secA | | 108279 | 110984 |
| mutT | | 111044 | 111433 |
| yacG | Complementary | 111649 | 111846 |
| | strand | | |
| yacF | Complementary | 111856 | 112599 |
| | strand | | |
| coaE | Complementary | 112599 | 113219 |
| | strand | | |
| guaC | | 113444 | 114487 |
| hofC | Complementary | 114522 | 115724 |
| | strand | | |
| hofB | Complementary | 115714 | 117099 |
| | strand | | |
| ppdD | Complementary | 117109 | 117549 |
| | strand | | |
| nadC | Complementary | 117752 | 118645 |
| | strand | | |
| ampD | | 118733 | 119284 |
| ampE | | 119281 | 120135 |
| aroP | Complementary | 120178 | 121551 |
| | strand | | |
| pdhR | | 122092 | 122856 |
| aceE | | 123017 | 125680 |
| aceF | | 125695 | 127587 |
| lpd | | 127912 | 129336 |
| yacH | Complementary | 129407 | 131260 |
| | strand | | |
| acnB | | 131615 | 134212 |
| yacL | | 134388 | 134750 |
| speD | Complementary | 134788 | 135582 |
| | strand | | |
| speE | Complementary | 135598 | 136464 |
| | strand | | |
| yacC | Complementary | 136570 | 136917 |
| | strand | | |
| cueO | | 137083 | 138633 |
| gcd | Complementary | 138835 | 141225 |
| | strand | | |
| hpt | | 141431 | 141967 |
| can | Complementary | 142008 | 142670 |
| | strand | | |
| yadG | | 142779 | 143705 |
| yadH | | 143702 | 144472 |
| yadI | | 144577 | 145017 |
| yadE | | 145081 | 146310 |
| panD | Complementary | 146314 | 146694 |
| | strand | | |
| yadD | | 146968 | 147870 |
| panC | Complementary | 147944 | 148795 |
| | strand | | |
| panB | Complementary | 148807 | 149601 |
| | strand | | |
| yadC | Complementary | 149715 | 150953 |
| | strand | | |
| yadK | Complementary | 151003 | 151599 |
| | strand | | |
| yadL | Complementary | 151626 | 152231 |
| | strand | | |
| yadM | Complementary | 152243 | 152812 |
| | strand | | |
| htrE | Complementary | 152829 | 155426 |
| | strand | | |
| ecpD | Complementary | 155461 | 156201 |
| | strand | | |
| yadN | Complementary | 156299 | 156883 |
| | strand | | |
| folK | Complementary | 157253 | 157732 |
| | strand | | |
| pcnB | Complementary | 157729 | 159126 |
| | strand | | |
| yadB | Complementary | 159186 | 160112 |
| | strand | | |
| dksA | Complementary | 160149 | 160604 |
| | strand | | |
| sfsA | Complementary | 160782 | 161486 |
| | strand | | |
| ligT | Complementary | 161501 | 162031 |
| | strand | | |
| hrpB | | 162105 | 164534 |
| mrcB | | 164730 | 167264 |
| fhuA | | 167484 | 169727 |
| fhuC | | 169778 | 170575 |
| fhuD | | 170575 | 171465 |
| fhuB | | 171462 | 173444 |
| hemL | Complementary | 173602 | 174882 |
| | strand | | |
| clcA | | 175107 | 176528 |
| yadR | | 176610 | 176954 |
| yadS | Complementary | 177001 | 177624 |
| | strand | | |
| btuF | Complementary | 177662 | 178462 |
| | strand | | |
| pfs | Complementary | 178455 | 179153 |
| | strand | | |
| dgt | | 179237 | 180754 |
| degP | | 180884 | 182308 |
| cdaR | | 182463 | 183620 |
| yaeH | Complementary | 183709 | 184095 |
| | strand | | |
| yaeI | Complementary | 184257 | 185069 |
| | strand | | |
| dapD | Complementary | 185123 | 185947 |
| | strand | | |
| glnD | Complementary | 185978 | 188650 |
| | strand | | |
| map | Complementary | 188712 | 189506 |
| | strand | | |
| tff | | 189712 | 189847 |
| rpsB | | 189874 | 190599 |
| tsf | | 190857 | 191708 |
| pyrH | | 191855 | 192580 |
| frr | | 192872 | 193429 |
| dxr | | 193521 | 194717 |
| ispU | | 194903 | 195664 |
| cdsA | | 195677 | 196534 |
| yaeL | | 196546 | 197898 |
| yaeT | | 197928 | 200360 |
| hlpA | | 200482 | 200967 |
| lpxD | | 200971 | 201996 |
| fabZ | | 202101 | 202556 |
| lpxA | | 202560 | 203348 |
| lpxB | | 203348 | 204496 |
| rnhB | | 204493 | 205089 |
| dnaE | | 205126 | 208608 |
| accA | | 208621 | 209580 |
| ldcC | | 209679 | 211820 |
| yaeR | | 211877 | 212266 |
| tilS | | 212331 | 213629 |
| rof | Complementary | 213678 | 213932 |
| | strand | | |
| yaeP | Complementary | 213925 | 214125 |
| | strand | | |
| yaeQ | | 214291 | 214836 |
| yaeJ | | 214833 | 215255 |
| nlpE | | 215269 | 215979 |
| yaeF | Complementary | 216179 | 217003 |
| | strand | | |
| proS | Complementary | 217057 | 218775 |
| | strand | | |
| yaeB | Complementary | 218887 | 219594 |
| | strand | | |
| rcsF | Complementary | 219591 | 219995 |
| | strand | | |
| metQ | Complementary | 220113 | 220928 |
| | strand | | |
| metI | Complementary | 220968 | 221621 |
| | strand | | |
| metN | Complementary | 221614 | 222645 |
| | strand | | |
| gmhB | | 222833 | 223408 |
| rrsH | | 223771 | 225312 |
| lleV | | 225381 | 225457 |
| alaV | | 225500 | 225575 |
| rriH | | 225759 | 228662 |
| rriH | | 228756 | 228875 |
| aspU | | 228928 | 229004 |
| dkgB | | 229167 | 229970 |
| yafC | Complementary | 229967 | 230881 |
| | strand | | |
| yafD | | 231122 | 231922 |
| yafE | | 231926 | 232549 |
| mltD | Complementary | 232597 | 233955 |
| | strand | | |
| gloB | Complementary | 234027 | 234782 |
| | strand | | |
| yafS | | 234816 | 235538 |
| rnhA | Complementary | 235535 | 236002 |
| | strand | | |
| dnaQ | | 236067 | 236798 |
| aspV | | 236931 | 237007 |
| yafT | | 237335 | 238120 |
| yafU | Complementary | 238746 | 239084 |
| | strand | | |
| yafF | | 239190 | 239378 |
| yafV | Complementary | 239419 | 240189 |
| | strand | | |
| ivy | | 240343 | 240816 |
| fadE | Complementary | 240859 | 243303 |
| | strand | | |
| lpcA | | 243543 | 244121 |
| yafJ | | 244327 | 245094 |
| yafK | Complementary | 245065 | 245805 |
| | strand | | |
| yafQ | Complementary | 245961 | 246239 |
| | strand | | |
| dinJ | Complementary | 246242 | 246502 |
| | strand | | |
| yafL | | 246712 | 247461 |
| yafM | | 247637 | 248134 |
| fhiA | Complementary | 248358 | 250070 |
| | strand | | |
| mbhA | | 250072 | 250827 |
| dinB | | 250898 | 251953 |
| yafN | | 252005 | 252298 |
| yafO | | 252301 | 252699 |
| yafP | | 252709 | 253161 |
| ykfJ | | 253467 | 253733 |
| prfH | | 253702 | 254202 |
| pepD | Complementary | 254259 | 255716 |
| | strand | | |
| gpt | | 255977 | 256435 |
| frsA | | 256527 | 257771 |
| crl | | 257829 | 258230 |
| phoE | Complementary | 258269 | 259324 |
| | strand | | |
| proB | | 259612 | 260715 |
| proA | | 260727 | 261980 |
| thrW | | 262095 | 262170 |
| ykfI | Complementary | 262552 | 262893 |
| | strand | | |
| yafW | Complementary | 262914 | 263231 |
| | strand | | |
| ykfH | Complementary | 263250 | 263471 |
| | strand | | |
| ykfG | Complementary | 263480 | 263956 |
| | strand | | |
| yafX | Complementary | 263972 | 264430 |
| | strand | | |
| ykfF | Complementary | 264528 | 264767 |
| | strand | | |
| ykfB | Complementary | 264844 | 265311 |
| | strand | | |
| yafY | Complementary | 265334 | 266191 |
| | strand | | |
| yafZ | Complementary | 266408 | 267229 |
| | strand | | |
| ykfA | Complementary | 267321 | 268184 |
| | strand | | |
| perR | Complementary | 268513 | 269406 |
| | strand | | |
| insN-1 | | 269466 | 269870 |
| insI-1 | | 269827 | 270978 |
| insO-1 | | 271054 | 271479 |
| ykfC | | 272071 | 273216 |
| insH-1 | Complementary | 273325 | 274341 |
| | strand | | |
| mmuP | | 274549 | 275952 |
| mmuM | | 275939 | 276871 |
| afuC | Complementary | 276980 | 278026 |
| | strand | | |
| afuB | Complementary | 278038 | 278400 |
| | strand | | |
| insB-2 | Complementary | 278402 | 278905 |
| | strand | | |
| insA-2 | Complementary | 278824 | 279099 |
| | strand | | |
| ykgN | Complementary | 279248 | 279586 |
| | strand | | |
| yagB | Complementary | 279609 | 279959 |
| | strand | | |
| yagA | Complementary | 280053 | 281207 |
| | strand | | |
| yagE | | 281481 | 282410 |
| yagF | | 282425 | 284392 |
| yagG | | 284619 | 286001 |
| yagH | | 286013 | 287623 |
| yagI | Complementary | 287628 | 288386 |
| | strand | | |
| argF | Complementary | 288525 | 289529 |
| | strand | | |
| insB-3 | Complementary | 289873 | 290376 |
| | strand | | |
| insA-3 | Complementary | 290295 | 290570 |
| | strand | | |
| yagJ | | 290724 | 291455 |
| yagK | Complementary | 291546 | 292172 |
| | strand | | |
| yagL | Complementary | 292444 | 293142 |
| | strand | | |
| yagM | Complementary | 293169 | 294023 |
| | strand | | |
| yagN | Complementary | 294363 | 294803 |
| | strand | | |
| intF | Complementary | 294920 | 296320 |
| | strand | | |
| yagP | Complementary | 296605 | 297015 |
| | strand | | |
| yagQ | Complementary | 296994 | 297950 |
| | strand | | |
| yagR | Complementary | 297960 | 300158 |
| | strand | | |
| yagS | Complementary | 300155 | 301111 |
| | strand | | |
| yagT | Complementary | 301108 | 301797 |
| | strand | | |
| yagU | | 302215 | 302829 |
| ykgJ | Complementary | 303077 | 303406 |
| | strand | | |
| yagV | Complementary | 303719 | 304429 |
| | strand | | |
| yagW | Complementary | 304398 | 306041 |
| | strand | | |
| yagX | Complementary | 306031 | 308556 |
| | strand | | |
| yagY | Complementary | 308582 | 309250 |
| | strand | | |
| yagZ | Complementary | 309308 | 309895 |
| | strand | | |
| ykgK | Complementary | 309970 | 310560 |
| | strand | | |
| ykgL | | 311336 | 311563 |
| ykgM(JW5034) | Complementary | 311598 | 311738 |
| | strand | | |
| ykgM(JW5035) | Complementary | 311738 | 312001 |
| | strand | | |
| eaeH | | 313581 | 314468 |
| insE-1 | | 314506 | 314814 |
| insF-1 | | 314811 | 315677 |
| ykgA | Complementary | 315674 | 316360 |
| | strand | | |
| ykgB | Complementary | 316950 | 317543 |
| | strand | | |
| ykgI | Complementary | 317555 | 317791 |
| | strand | | |
| ykgC | Complementary | 317900 | 319225 |
| | strand | | |
| ykgD | | 319451 | 320305 |
| ykgE | | 320832 | 321551 |
| ykgF | | 321562 | 322989 |
| ykgG | | 322982 | 323677 |
| ykgH | Complementary | 323920 | 324588 |
| | strand | | |
| betA | Complementary | 324801 | 326471 |
| | strand | | |
| betB | Complementary | 326485 | 327957 |
| | strand | | |
| betI | Complementary | 327971 | 328558 |
| | strand | | |
| betT | | 328687 | 330720 |
| yahA | | 331595 | 332683 |
| yahB | Complementary | 332725 | 333657 |
| | strand | | |
| yahC | Complementary | 333749 | 334246 |
| | strand | | |
| yahD | | 334504 | 335109 |
| yahE | | 335149 | 336012 |
| yahF | | 336002 | 337549 |
| yahG | | 337549 | 338967 |
| yahH | | 339017 | 339313 |
| yahI | | 339389 | 340339 |
| yahJ | | 340349 | 341731 |
| yahK | | 342108 | 343157 |
| yahL | | 343400 | 344215 |
| yahM | | 344628 | 344873 |
| yahN | Complementary | 344890 | 345561 |
| | strand | | |
| yahO | | 345708 | 345983 |
| prpR | Complementary | 346081 | 347667 |
| | strand | | |
| prpB | | 347906 | 348796 |
| prpC | | 349236 | 350405 |
| prpD | | 350439 | 351890 |
| prpE | | 351930 | 353816 |
| codB | | 354146 | 355405 |
| codA | | 355395 | 356678 |
| cynR | Complementary | 357015 | 357914 |
| | strand | | |
| cynT | | 358023 | 358682 |
| cynS | | 358713 | 359183 |
| cynX | | 359216 | 360370 |
| lacA | Complementary | 360473 | 361084 |
| | strand | | |
| lacY | Complementary | 361150 | 362403 |
| | strand | | |
| lacZ | Complementary | 362455 | 365529 |
| | strand | | |
| lacI | Complementary | 365652 | 366734 |
| | strand | | |
| mhpR | Complementary | 366811 | 367758 |
| | strand | | |
| mhpA | | 367835 | 369499 |
| mhpB | | 369501 | 370445 |
| mhpC | | 370448 | 371329 |
| mhpD | | 371339 | 372148 |
| mhpF | | 372145 | 373095 |
| mhpE | | 373092 | 374105 |
| mhpT | | 374683 | 375894 |
| yaiL | | 375996 | 376535 |
| frmB | Complementary | 376759 | 377592 |
| | strand | | |
| frmA | Complementary | 377686 | 378795 |
| | strand | | |
| frmR | Complementary | 378830 | 379105 |
| | strand | | |
| yalO | Complementary | 379293 | 380066 |
| | strand | | |
| yaiX | Complementary | 380068 | 380283 |
| | strand | | |
| insC-1 | | 380530 | 380940 |
| insD-1 | | 380898 | 381803 |
| yaiF | Complementary | 381728 | 382114 |
| | strand | | |
| yaiP | Complementary | 381963 | 383159 |
| | strand | | |
| yaiS | Complementary | 383283 | 383840 |
| | strand | | |
| tauA | | 384456 | 385418 |
| tauB | | 385431 | 386198 |
| tauC | | 386195 | 387022 |
| tauD | | 387019 | 387870 |
| hemB | Complementary | 387977 | 388951 |
| | strand | | |
| ykiB | Complementary | 389121 | 389339 |
| | strand | | |
| yaiT | | 389475 | 390935 |
| insF-2 | Complementary | 390963 | 391829 |
| | strand | | |
| insE-2 | Complementary | 391826 | 392134 |
| | strand | | |
| yaiU | | 392239 | 393642 |
| yaiV | | 393685 | 394353 |
| ampH | Complementary | 394354 | 395511 |
| | strand | | |
| sbmA | | 395863 | 397083 |
| yaiW | | 397096 | 398190 |
| yaiY | Complementary | 398249 | 398557 |
| | strand | | |
| yaiZ | | 398817 | 399029 |
| ddlA | Complementary | 399053 | 400147 |
| | strand | | |
| yaiB | | 400610 | 400870 |
| phoA | | 400971 | 402386 |
| psiF | | 402505 | 402825 |
| yaiC | | 402927 | 404042 |
| proC | Complementary | 404059 | 404868 |
| | strand | | |
| yaiI | | 404988 | 405446 |
| aroL | | 405629 | 406153 |
| yaiA | | 406203 | 406394 |
| aroM | | 406652 | 407329 |
| yaiE | | 407401 | 407685 |
| ykiA | | 407893 | 408174 |
| rdgC | Complementary | 408332 | 409243 |
| | strand | | |
| mak | | 409368 | 410276 |
| araJ | Complementary | 410521 | 411705 |
| | strand | | |
| sbcC | Complementary | 411831 | 414977 |
| | strand | | |
| sbcD | Complementary | 414974 | 416176 |
| | strand | | |
| phoB | | 416366 | 417055 |
| phoR | | 417113 | 418408 |
| brnQ | | 418815 | 420134 |
| proY | | 420210 | 421583 |
| malZ | | 421739 | 423556 |
| yajB | Complementary | 423561 | 424142 |
| | strand | | |
| queA | | 424235 | 425305 |
| tgt | | 425361 | 426488 |
| yajC | | 426511 | 426843 |
| secD | | 426871 | 428718 |
| secF | | 428729 | 429700 |
| yajD | | 429829 | 430176 |
| tsx | Complementary | 430353 | 431237 |
| | strand | | |
| yajI | Complementary | 431536 | 432075 |
| | strand | | |
| ybaD | | 432226 | 432675 |
| ribD | | 432679 | 433782 |
| ribE | | 433871 | 434341 |
| nusB | | 434361 | 434780 |
| thiL | | 434858 | 435835 |
| pgpA | | 435813 | 436331 |
| yajO | Complementary | 436385 | 437359 |
| | strand | | |
| dxs | Complementary | 437539 | 439401 |
| | strand | | |
| ispA | Complementary | 439426 | 440325 |
| | strand | | |
| xseB | Complementary | 440325 | 440567 |
| | strand | | |
| thiI | | 440773 | 442221 |
| yajL | Complementary | 442275 | 442865 |
| | strand | | |
| panE | Complementary | 442828 | 443739 |
| | strand | | |
| yajQ | | 443907 | 444398 |
| yajR | Complementary | 444526 | 445890 |
| | strand | | |
| cyoE | Complementary | 446039 | 446929 |
| | strand | | |
| cyoD | Complementary | 446941 | 447270 |
| | strand | | |
| cyoC | Complementary | 447270 | 447884 |
| | strand | | |
| cyoB | Complementary | 447874 | 449865 |
| | strand | | |
| cyoA | Complementary | 449887 | 450834 |
| | strand | | |
| ampG | Complementary | 451294 | 452769 |
| | strand | | |
| yajG | Complementary | 452813 | 453391 |
| | strand | | |
| bolA | | 453696 | 454013 |
| tig | | 454357 | 455655 |
| clpP | | 455901 | 456524 |
| clpX | | 456650 | 457924 |
| lon | | 458112 | 460466 |
| hupB | | 460675 | 460947 |
| ppiD | | 461139 | 463010 |
| ybaV | | 463161 | 463532 |
| ybaW | | 463626 | 464024 |
| ybaX | Complementary | 464076 | 464771 |
| | strand | | |
| ybaE | Complementary | 464836 | 466536 |
| | strand | | |
| cof | | 466636 | 467454 |
| ybaO | | 467607 | 468065 |
| mdlA | | 468095 | 469867 |
| mdlB | | 469860 | 471641 |
| glnK | | 471822 | 472160 |
| amtB | | 472190 | 473476 |
| tesB | Complementary | 473525 | 474385 |
| | strand | | |
| ybaY | | 474603 | 475175 |
| ybaZ | Complementary | 475206 | 475595 |
| | strand | | |
| ffs | | 475672 | 475785 |
| ybaA | | 475896 | 476249 |
| ylaB | Complementary | 476291 | 477841 |
| | strand | | |
| ylaC | Complementary | 478005 | 478475 |
| | strand | | |
| maa | Complementary | 478591 | 479142 |
| | strand | | |
| hha | Complementary | 479314 | 479532 |
| | strand | | |
| ybaJ | Complementary | 479558 | 479932 |
| | strand | | |
| acrB | Complementary | 480478 | 483627 |
| | strand | | |
| acrA | Complementary | 483650 | 484843 |
| | strand | | |
| acrR | | 484985 | 485632 |
| kefA | | 485760 | 489122 |
| ybaM | Complementary | 489334 | 489495 |
| | strand | | |
| priC | Complementary | 489509 | 490036 |
| | strand | | |
| ybaN | | 490106 | 490483 |
| apf | | 490636 | 491187 |
| dnaX | | 491316 | 493247 |
| ybaB | | 493300 | 493629 |
| recR | | 493629 | 494234 |
| htpG | | 494344 | 496218 |
| adk | | 496399 | 497043 |
| hemH | | 497279 | 498241 |
| aes | Complementary | 498238 | 499197 |
| | strand | | |
| gsk | | 499349 | 500653 |
| ybaL | Complementary | 500786 | 502462 |
| | strand | | |
| fsr | Complementary | 502700 | 503920 |
| | strand | | |
| ushA | | 504138 | 505790 |
| ybaK | Complementary | 505827 | 506306 |
| | strand | | |
| ybaP | Complementary | 506510 | 507304 |
| | strand | | |
| ybaQ | | 507442 | 507783 |
| copA | Complementary | 508099 | 510603 |
| | strand | | |
| ybaS | | 510865 | 511797 |
| ybaT | | 511800 | 513092 |
| cueR | | 513217 | 513624 |
| ybbJ | Complementary | 513625 | 514080 |
| | strand | | |
| ybbK | Complementary | 514080 | 514997 |
| | strand | | |
| ybbL | | 515143 | 515820 |
| ybbM | | 515807 | 516586 |
| ybbN | Complementary | 516649 | 517503 |
| | strand | | |
| ybbO | Complementary | 517564 | 518373 |
| | strand | | |
| tesA | Complementary | 518363 | 518989 |
| | strand | | |
| ybbA | | 518957 | 519643 |
| ybbP | | 519640 | 522054 |
| rhsD | | 522485 | 526765 |
| ybbC | | 526805 | 527173 |
| ylbH | | 527173 | 527883 |
| ybbD | | 527864 | 528124 |
| ylbG | Complementary | 528869 | 529240 |
| | strand | | |
| ybbB | Complementary | 529356 | 530450 |
| | strand | | |
| ybbS | Complementary | 530519 | 531445 |
| | strand | | |
| allA | | 531675 | 532157 |
| allR | | 532235 | 533050 |
| gcl | | 533140 | 534921 |
| hyl | | 534934 | 535710 |
| glxR | | 535810 | 536688 |
| ybbV | | 536720 | 536998 |
| ybbW | | 536857 | 538311 |
| allB | | 538371 | 539732 |
| ybbY | | 539789 | 541090 |
| glxK | | 541112 | 542257 |
| ylbA | Complementary | 542485 | 543270 |
| | strand | | |
| allC | Complementary | 543281 | 544516 |
| | strand | | |
| allD | Complementary | 544538 | 545587 |
| | strand | | |
| fdrA | | 545904 | 547571 |
| ylbE_1 | | 547581 | 547841 |
| ylbE_2 | | 547838 | 548839 |
| ylbF | | 548850 | 549665 |
| ybcF | | 549662 | 550555 |
| purK | Complementary | 550750 | 551817 |
| | strand | | |
| purE | Complementary | 551814 | 552323 |
| | strand | | |
| lpxH | Complementary | 552441 | 553163 |
| | strand | | |
| ppiB | Complementary | 553166 | 553660 |
| | strand | | |
| cysS | | 553834 | 555219 |
| ybcI | Complementary | 555255 | 555776 |
| | strand | | |
| ybcJ | Complementary | 555884 | 556096 |
| | strand | | |
| folD | Complementary | 556098 | 556964 |
| | strand | | |
| sfmA | | 557435 | 557977 |
| sfmC | | 558197 | 558889 |
| sfmD | | 558920 | 561523 |
| sfmH | | 561565 | 562542 |
| sfmF | | 562553 | 563068 |
| fimZ | Complementary | 563071 | 563703 |
| | strand | | |
| argU | | 563946 | 564022 |
| intD | Complementary | 564038 | 565201 |
| | strand | | |
| yboC | Complementary | 565321 | 565584 |
| | strand | | |
| ybcD | | 565674 | 565910 |
| insE-3 | | 566056 | 566364 |
| insF-3 | | 566361 | 567227 |
| renD | | 567285 | 567470 |
| emrE | | 567538 | 567870 |
| ybcK | | 568125 | 569651 |
| ybcL | | 570116 | 570667 |
| ybcM | | 570677 | 571474 |
| ybcN | | 571689 | 572144 |
| ninE | | 572144 | 572314 |
| ybcO | | 572307 | 572597 |
| rusA | | 572594 | 572956 |
| ylcG | | 572953 | 573093 |
| ybcQ | | 573179 | 573562 |
| insH-2 | Complementary | 573960 | 574976 |
| | strand | | |
| nmpC | Complementary | 574981 | 576108 |
| | strand | | |
| essD | | 576621 | 576836 |
| ybcS | | 576836 | 577333 |
| rzpD | | 577330 | 577791 |
| rzoD | | 577550 | 577732 |
| borD | Complementary | 577823 | 578116 |
| | strand | | |
| ybcV | Complementary | 578407 | 578817 |
| | strand | | |
| ybcW | | 579103 | 579309 |
| nohB | | 580057 | 580602 |
| tfaD | | 580757 | 581320 |
| ybcY | Complementary | 581375 | 581959 |
| | strand | | |
| ylcE | | 582098 | 582283 |
| appY | | 582904 | 583653 |
| ompT | Complementary | 583903 | 584856 |
| | strand | | |
| envY | Complementary | 585370 | 586131 |
| | strand | | |
| ybcH | Complementary | 586314 | 587204 |
| | strand | | |
| nfrA | Complementary | 587205 | 590177 |
| | strand | | |
| nfrB | Complementary | 590164 | 592401 |
| | strand | | |
| cusS | Complementary | 592551 | 593993 |
| | strand | | |
| cusR | Complementary | 593983 | 594666 |
| | strand | | |
| cusC | | 594823 | 596196 |
| cusF | | 596354 | 596686 |
| cusB | | 596702 | 597925 |
| cusA | | 597937 | 601080 |
| pheP | | 601182 | 602558 |
| ybdG | Complementary | 602639 | 603886 |
| | strand | | |
| nfnB | Complementary | 603994 | 604647 |
| | strand | | |
| ybdF | Complementary | 604741 | 605109 |
| | strand | | |
| ybdJ | Complementary | 605174 | 605422 |
| | strand | | |
| ybdK | Complementary | 605488 | 606606 |
| | strand | | |
| hokE | | 607059 | 607211 |
| insL-2 | | 607288 | 608400 |
| entD | Complementary | 608682 | 609311 |
| | strand | | |
| fepA | Complementary | 609477 | 611717 |
| | strand | | |
| fes | | 612038 | 613162 |
| ybdZ | | 613165 | 613383 |
| entF | | 613380 | 617261 |
| fepE | | 617477 | 618610 |
| fepC | Complementary | 618607 | 619422 |
| | strand | | |
| fepG | Complementary | 619419 | 620411 |
| | strand | | |
| fepD | Complementary | 620408 | 621412 |
| | strand | | |
| ybdA | | 621523 | 622773 |
| fepB | Complementary | 622777 | 623733 |
| | strand | | |
| entC | | 624108 | 625283 |
| entE | | 625293 | 626903 |
| entB | | 626917 | 627774 |
| entA | | 627774 | 628520 |
| ybdB | | 628523 | 628936 |
| cstA | | 629117 | 631222 |
| ybdD | | 631405 | 631602 |
| ybdH | Complementary | 631612 | 632700 |
| | strand | | |
| ybdL | | 632809 | 633969 |
| ybdM | Complementary | 633970 | 634599 |
| | strand | | |
| ybdN | Complementary | 634572 | 635792 |
| | strand | | |
| ybdO | Complementary | 635939 | 636841 |
| | strand | | |
| dsbG | Complementary | 637050 | 637796 |
| | strand | | |
| ahpC | | 638168 | 638731 |
| ahpF | | 638976 | 640541 |
| uspG | Complementary | 640662 | 641090 |
| | strand | | |
| ybdR | | 641311 | 642549 |
| rnk | Complementary | 642780 | 643190 |
| | strand | | |
| rna | Complementary | 643420 | 644226 |
| | strand | | |
| citT | Complementary | 644340 | 645803 |
| | strand | | |
| citG | Complementary | 645854 | 646732 |
| | strand | | |
| citX | Complementary | 646707 | 647258 |
| | strand | | |
| citF | Complementary | 647262 | 648794 |
| | strand | | |
| citE | Complementary | 648805 | 649713 |
| | strand | | |
| citD | Complementary | 649710 | 650006 |
| | strand | | |
| citC | Complementary | 650021 | 651079 |
| | strand | | |
| citA | | 651458 | 653116 |
| citB | | 653085 | 653765 |
| dcuC | Complementary | 653806 | 654282 |
| | strand | | |
| dcuC | Complementary | 653806 | 656390 |
| | strand | | |
| insH | | 654281 | 655261 |
| dcuC | Complementary | 655299 | 656390 |
| | strand | | |
| crcA | | 656979 | 657539 |
| cspE | | 657714 | 657923 |
| crcB | Complementary | 657977 | 658360 |
| | strand | | |
| ybeH | | 658453 | 658680 |
| ybeM | | 658677 | 659240 |
| tatE | | 659369 | 659572 |
| lipA | Complementary | 659673 | 660638 |
| | strand | | |
| ybeF | Complementary | 660847 | 661800 |
| | strand | | |
| lipB | Complementary | 662059 | 662700 |
| | strand | | |
| ybeD | Complementary | 662801 | 663064 |
| | strand | | |
| dacA | Complementary | 663174 | 664385 |
| | strand | | |
| rlpA | Complementary | 664524 | 665612 |
| | strand | | |
| mrdB | Complementary | 665623 | 666735 |
| | strand | | |
| mrdA | Complementary | 666738 | 668639 |
| | strand | | |
| ybeA | Complementary | 668670 | 669137 |
| | strand | | |
| ybeB | Complementary | 669141 | 669458 |
| | strand | | |
| cobC | Complementary | 669718 | 670329 |
| | strand | | |
| nadD | Complementary | 670353 | 670994 |
| | strand | | |
| holA | Complementary | 670996 | 672027 |
| | strand | | |
| rlpB | Complementary | 672027 | 672608 |
| | strand | | |
| leuS | Complementary | 672623 | 675205 |
| | strand | | |
| ybeL | | 675440 | 675922 |
| ybeQ | Complementary | 675992 | 676969 |
| | strand | | |
| ybeR | | 677133 | 677840 |
| djlB | | 677837 | 679264 |
| ybeT | Complementary | 679274 | 679828 |
| | strand | | |
| ybeU | | 679930 | 680637 |
| djlC | | 680634 | 682085 |
| hscC | Complementary | 682145 | 683815 |
| | strand | | |
| rihA | Complementary | 683899 | 684834 |
| | strand | | |
| gltL | Complementary | 684952 | 685677 |
| | strand | | |
| gltK | Complementary | 685677 | 686351 |
| | strand | | |
| gltJ | Complementary | 686351 | 687091 |
| | strand | | |
| gltI | Complementary | 687261 | 688169 |
| | strand | | |
| insH-3 | Complementary | 688419 | 689435 |
| | strand | | |
| lnt | Complementary | 689765 | 691303 |
| | strand | | |
| ybeX | Complementary | 691328 | 692206 |
| | strand | | |
| ybeY | Complementary | 692296 | 692763 |
| | strand | | |
| ybeZ | Complementary | 692760 | 693839 |
| | strand | | |
| miaB | Complementary | 693953 | 695377 |
| | strand | | |
| ubiF | | 695523 | 696698 |
| glnX | Complementary | 696852 | 696926 |
| | strand | | |
| glnV | Complementary | 696964 | 697038 |
| | strand | | |
| metU | Complementary | 697086 | 697162 |
| | strand | | |
| glnW | Complementary | 697178 | 697252 |
| | strand | | |
| glnU | Complementary | 697287 | 697361 |
| | strand | | |
| leuW | Complementary | 697385 | 697469 |
| | strand | | |
| metT | Complementary | 697479 | 697555 |
| | strand | | |
| asnB | Complementary | 697935 | 699599 |
| | strand | | |
| nagD | Complementary | 699996 | 700748 |
| | strand | | |
| nagC | Complementary | 700796 | 702016 |
| | strand | | |
| nagA | Complementary | 702025 | 703173 |
| | strand | | |
| nagB | Complementary | 703233 | 704033 |
| | strand | | |
| nagE | | 704366 | 706312 |
| glnS | | 706515 | 708179 |
| ybfM | | 708756 | 710162 |
| ybfN | | 710212 | 710538 |
| fur | Complementary | 710622 | 711068 |
| | strand | | |
| fldA | Complementary | 711357 | 711887 |
| | strand | | |
| ybfE | Complementary | 712027 | 712320 |
| | strand | | |
| ybfF | Complementary | 712460 | 713224 |
| | strand | | |
| seqA | | 713409 | 713954 |
| pgm | | 713980 | 715620 |
| ybfP | | 715834 | 716328 |
| ybfG | Complementary | 716369 | 716779 |
| | strand | | |
| ybfH | Complementary | 716810 | 717019 |
| | strand | | |
| potE | Complementary | 717368 | 718687 |
| | strand | | |
| speF | Complementary | 718684 | 720882 |
| | strand | | |
| kdpE | Complementary | 721478 | 722155 |
| | strand | | |
| kdpD | Complementary | 722152 | 724836 |
| | strand | | |
| kdpC | Complementary | 724829 | 725401 |
| | strand | | |
| kdpB | Complementary | 725410 | 727458 |
| | strand | | |
| kdpA | Complementary | 727481 | 729154 |
| | strand | | |
| kdpF | Complementary | 729154 | 729243 |
| | strand | | |
| ybfA | | 729556 | 729762 |
| rhsC | | 730005 | 734198 |
| ybfB | | 734198 | 734524 |
| ybfO | | 734642 | 736075 |
| ybfC | | 736072 | 736641 |
| ybfQ | | 736867 | 737121 |
| ybfL | | 737322 | 738383 |
| ybfD | | 738514 | 739275 |
| ybgA | | 739423 | 739932 |
| phr | | 739929 | 741347 |
| ybgH | Complementary | 741497 | 742978 |
| | strand | | |
| ybgI | | 743249 | 743992 |
| ybgJ | | 744015 | 744671 |
| ybgK | | 744665 | 745597 |
| ybgL | | 745587 | 746321 |
| nei | | 746357 | 747148 |
| abrB | Complementary | 747145 | 748191 |
| | strand | | |
| ybgO | Complementary | 748343 | 749404 |
| | strand | | |
| ybgP | Complementary | 749401 | 750129 |
| | strand | | |
| ybgQ | Complementary | 750144 | 752591 |
| | strand | | |
| ybgD | Complementary | 752651 | 753217 |
| | strand | | |
| gltA | Complementary | 753607 | 754890 |
| | strand | | |
| sdhC | | 755599 | 755988 |
| sdhD | | 755982 | 756329 |
| sdhA | | 756329 | 758095 |
| sdhB | | 758111 | 758827 |
| sucA | | 759128 | 761929 |
| sucB | | 761944 | 763161 |
| sucC | | 763436 | 764602 |
| sucD | | 764602 | 765471 |
| mngR | Complementary | 765575 | 766297 |
| | strand | | |
| mngA | | 766406 | 768382 |
| mngB | | 768400 | 771033 |
| cydA | | 771880 | 773448 |
| cydB | | 773464 | 774603 |
| ybgT | | 774618 | 774731 |
| ybgE | | 774731 | 775024 |
| ybgC | | 775174 | 775578 |
| tolQ | | 775575 | 776267 |
| tolR | | 776271 | 776699 |
| tolA | | 776764 | 778029 |
| tolB | | 778162 | 779454 |
| pal | | 779489 | 780010 |
| ybgF | | 780020 | 780811 |
| lysT | | 780976 | 781051 |
| valT | | 781187 | 781262 |
| lysW | | 781265 | 781340 |
| valZ | | 781490 | 781565 |
| lysY | | 781569 | 781644 |
| lysZ | | 781791 | 781866 |
| lysQ | | 781999 | 782074 |
| nadA | | 782507 | 783550 |
| pnuC | | 783588 | 784307 |
| zitB | Complementary | 784304 | 785245 |
| | strand | | |
| ybgS | Complementary | 785359 | 785739 |
| | strand | | |
| aroG | | 786055 | 787107 |
| gpmA | Complementary | 787265 | 788017 |
| | strand | | |
| galM | Complementary | 788219 | 789259 |
| | strand | | |
| galK | Complementary | 789253 | 790401 |
| | strand | | |
| galT | Complementary | 790405 | 791451 |
| | strand | | |
| galE | Complementary | 791461 | 792477 |
| | strand | | |
| modF | Complementary | 792738 | 794210 |
| | strand | | |
| modE | Complementary | 794278 | 795066 |
| | strand | | |
| ybhT | | 795195 | 795344 |
| modA | | 795511 | 796284 |
| modB | | 796284 | 796973 |
| modC | | 796976 | 798034 |
| ybhA | Complementary | 798035 | 798853 |
| | strand | | |
| ybhE | | 799008 | 800003 |
| ybhD | Complementary | 800044 | 801060 |
| | strand | | |
| ybhH | | 801181 | 802233 |
| ybhI | | 802309 | 803742 |
| ybhJ | | 803925 | 806186 |
| ybhC | Complementary | 806420 | 807703 |
| | strand | | |
| ybhB | Complementary | 807855 | 808331 |
| | strand | | |
| bioA | Complementary | 808390 | 809679 |
| | strand | | |
| bioB | | 809766 | 810806 |
| bioF | | 810803 | 811957 |
| bioC | | 811944 | 812699 |
| bioD | | 812692 | 813369 |
| uvrB | | 813948 | 815969 |
| ybhK | Complementary | 816161 | 817069 |
| | strand | | |
| moaA | | 817466 | 818455 |
| moaB | | 818477 | 818989 |
| moaC | | 818992 | 819477 |
| moaD | | 819470 | 819715 |
| moaE | | 819717 | 820169 |
| ybhL | | 820306 | 821010 |
| ybhM | | 821215 | 821928 |
| ybhN | Complementary | 821964 | 822920 |
| | strand | | |
| ybhO | Complementary | 822920 | 824161 |
| | strand | | |
| ybhP | Complementary | 824158 | 824919 |
| | strand | | |
| ybhQ | | 825052 | 825462 |
| ybhR | Complementary | 825424 | 826530 |
| | strand | | |
| ybhS | Complementary | 826541 | 827674 |
| | strand | | |
| ybhF | Complementary | 827667 | 829403 |
| | strand | | |
| ybhG | Complementary | 829396 | 830394 |
| | strand | | |
| ybiH | Complementary | 830394 | 831065 |
| | strand | | |
| rhlE | | 831294 | 832658 |
| ybiA | Complementary | 832890 | 833372 |
| | strand | | |
| dinG | | 833492 | 835642 |
| ybiB | | 835670 | 836632 |
| ybiC | | 836773 | 837858 |
| ybiJ | Complementary | 838087 | 838347 |
| | strand | | |
| ybiI | Complementary | 838612 | 838878 |
| | strand | | |
| ybiX | Complementary | 838952 | 839629 |
| | strand | | |
| flu | Complementary | 839671 | 841953 |
| | strand | | |
| ybiM | Complementary | 842218 | 842478 |
| | strand | | |
| ybiN | | 842754 | 843680 |
| ybiO | Complementary | 843677 | 845902 |
| | strand | | |
| glnQ | Complementary | 846163 | 846885 |
| | strand | | |
| glnP | Complementary | 846882 | 847541 |
| | strand | | |
| glnH | Complementary | 847680 | 848426 |
| | strand | | |
| dps | Complementary | 848830 | 849333 |
| | strand | | |
| rhtA | Complementary | 849632 | 850519 |
| | strand | | |
| ompX | | 850872 | 851387 |
| ybiP | Complementary | 851436 | 853019 |
| | strand | | |
| yliL | | 853093 | 853362 |
| rybA | Complementary | 853374 | 853462 |
| | strand | | |
| mntR | | 853605 | 854072 |
| ybiR | | 854069 | 855187 |
| ybiS | Complementary | 855246 | 856166 |
| | strand | | |
| ybiT | | 856385 | 857977 |
| ybiU | Complementary | 858218 | 859483 |
| | strand | | |
| ybiV | Complementary | 859635 | 860450 |
| | strand | | |
| ybiW | Complementary | 860596 | 863028 |
| | strand | | |
| ybiY | Complementary | 863034 | 863960 |
| | strand | | |
| fsaA | | 864064 | 864726 |
| moeB | Complementary | 864802 | 865551 |
| | strand | | |
| moeA | Complementary | 865551 | 866786 |
| | strand | | |
| iaaA | | 866990 | 867955 |
| yliA | | 867975 | 869813 |
| yliB | | 869833 | 871371 |
| yliC | | 871389 | 872309 |
| yliD | | 872312 | 873223 |
| yliE | | 873401 | 875749 |
| yliF | | 875757 | 877085 |
| yliG | Complementary | 877132 | 878457 |
| | strand | | |
| yliH | | 878670 | 879053 |
| yliI | | 879164 | 880279 |
| yliJ | Complementary | 880276 | 880902 |
| | strand | | |
| dacC | | 881149 | 882351 |
| deoR | Complementary | 882398 | 883156 |
| | strand | | |
| ybjG | Complementary | 883214 | 883810 |
| | strand | | |
| cmr | | 884095 | 885327 |
| ybjH | Complementary | 885368 | 885652 |
| | strand | | |
| ybjI | Complementary | 885738 | 886553 |
| | strand | | |
| ybjJ | Complementary | 886553 | 887761 |
| | strand | | |
| ybjK | | 887845 | 888381 |
| rybB | Complementary | 888398 | 888476 |
| | strand | | |
| ybjL | Complementary | 888556 | 890241 |
| | strand | | |
| ybjM | | 890511 | 890888 |
| grxA | Complementary | 890918 | 891175 |
| | strand | | |
| ybjC | | 891335 | 891622 |
| nfsA | | 891606 | 892328 |
| rimK | | 892389 | 893291 |
| ybjN | | 893379 | 893855 |
| potF | | 894206 | 895318 |
| potG | | 895413 | 896546 |
| potH | | 896556 | 897509 |
| potI | | 897506 | 898351 |
| ybjO | | 898411 | 898899 |
| rumB | | 898940 | 900067 |
| artJ | Complementary | 900266 | 900997 |
| | strand | | |
| artM | Complementary | 901288 | 901956 |
| | strand | | |
| artQ | Complementary | 901956 | 902672 |
| | strand | | |
| artI | Complementary | 902679 | 903410 |
| | strand | | |
| artP | Complementary | 903428 | 904156 |
| | strand | | |
| ybjP | Complementary | 904374 | 904889 |
| | strand | | |
| ybjQ | | 905015 | 905338 |
| ybjR | | 905335 | 906165 |
| ybjS | Complementary | 906162 | 907175 |
| | strand | | |
| ybjT | Complementary | 907274 | 908704 |
| | strand | | |
| ltaE | Complementary | 908715 | 909716 |
| | strand | | |
| poxB | Complementary | 909753 | 911471 |
| | strand | | |
| hcr | Complementary | 911604 | 912572 |
| | strand | | |
| hcp | Complementary | 912584 | 914236 |
| | strand | | |
| ybjE | Complementary | 914380 | 915279 |
| | strand | | |
| aqpZ | Complementary | 915774 | 916469 |
| | strand | | |
| ybjD | | 916895 | 918553 |
| ybjX | Complementary | 918550 | 919542 |
| | strand | | |
| macA | | 919657 | 920772 |
| macB | | 920769 | 922715 |
| cspD | Complementary | 922788 | 923012 |
| | strand | | |
| clpS | | 923335 | 923655 |
| clpA | | 923686 | 925962 |
| serW | Complementary | 926306 | 926393 |
| | strand | | |
| infA | Complementary | 926647 | 926865 |
| | strand | | |
| aat | Complementary | 927150 | 927854 |
| | strand | | |
| cydC | Complementary | 927896 | 929617 |
| | strand | | |
| cydD | Complementary | 929618 | 931384 |
| | strand | | |
| trxB | Complementary | 931507 | 932472 |
| | strand | | |
| lrp | | 933017 | 933511 |
| ftsK | | 933646 | 937635 |
| loiA | | 937791 | 938405 |
| ycaJ | | 938416 | 939759 |
| serS | | 939850 | 941142 |
| dmsA | | 941381 | 943825 |
| dmsB | | 943836 | 944453 |
| dmsC | | 944455 | 945318 |
| ycaC | Complementary | 945353 | 945979 |
| | strand | | |
| ycaD | | 946293 | 947441 |
| ycaM | | 947651 | 949081 |
| ycaN | Complementary | 949082 | 949990 |
| | strand | | |
| ycaK | | 950090 | 950680 |
| pflA | Complementary | 950762 | 951502 |
| | strand | | |
| pflB | Complementary | 951694 | 953976 |
| | strand | | |
| focA | Complementary | 954031 | 954888 |
| | strand | | |
| ycaO | Complementary | 955294 | 957054 |
| | strand | | |
| ycaP | | 957184 | 957876 |
| serC | | 958075 | 959163 |
| aroA | | 959234 | 960517 |
| ycaL | | 960686 | 961450 |
| cmk | | 961623 | 962306 |
| rpsA | | 962417 | 964090 |
| ihfB | | 964250 | 964534 |
| ycaI | | 964742 | 967006 |
| msbA | | 967043 | 968791 |
| lpxK | | 968788 | 969774 |
| ycaQ | | 969811 | 971043 |
| ycaR | | 971095 | 971277 |
| kdsB | | 971274 | 972020 |
| ycbJ | | 972174 | 973067 |
| ycbC | Complementary | 973044 | 973823 |
| | strand | | |
| smtA | | 973959 | 974744 |
| mukF | | 974741 | 976063 |
| mukE | | 976071 | 976748 |
| mukB | | 976748 | 981208 |
| ycbB | | 981469 | 983316 |
| ycbK | | 983497 | 984045 |
| ycbL | | 984072 | 984719 |
| aspC | Complementary | 984941 | 986131 |
| | strand | | |
| ompF | Complementary | 986316 | 987404 |
| | strand | | |
| asnS | Complementary | 988007 | 989407 |
| | strand | | |
| pncB | Complementary | 989576 | 990778 |
| | strand | | |
| pepN | | 991044 | 993656 |
| ssuB | Complementary | 993699 | 994466 |
| | strand | | |
| ssuC | Complementary | 994463 | 995254 |
| | strand | | |
| ssuD | Complementary | 995265 | 996410 |
| | strand | | |
| ssuA | Complementary | 996407 | 997366 |
| | strand | | |
| ssuE | Complementary | 997359 | 997934 |
| | strand | | |
| ycbQ | | 998290 | 998829 |
| ycbR | | 998912 | 999613 |
| ycbS | | 999638 | 1002238 |
| ycbT | | 1002229 | 1003299 |
| ycbU | | 1003311 | 1003853 |
| ycbV | | 1003861 | 1004376 |
| ycbF | | 1004369 | 1005079 |
| pyrD | | 1005190 | 1006200 |
| ycbW | | 1006374 | 1006916 |
| ycbX | Complementary | 1006913 | 1008022 |
| | strand | | |
| ycbY | | 1008266 | 1010374 |
| uup | | 1010386 | 1012293 |
| pqiA | | 1012423 | 1013676 |
| pqiB | | 1013681 | 1015321 |
| ymbA | | 1015333 | 1015881 |
| rmf | | 1016137 | 1016304 |
| fabA | Complementary | 1016374 | 1016892 |
| | strand | | |
| ycbZ | Complementary | 1016961 | 1018721 |
| | strand | | |
| ycbG | | 1018907 | 1019359 |
| ompA | Complementary | 1019435 | 1020475 |
| | strand | | |
| sulA | Complementary | 1020832 | 1021341 |
| | strand | | |
| yccR | | 1021560 | 1022189 |
| yccS | Complementary | 1022152 | 1024305 |
| | strand | | |
| yccF | Complementary | 1024324 | 1024770 |
| | strand | | |
| helD | | 1024893 | 1026947 |
| mgsA | Complementary | 1026979 | 1027437 |
| | strand | | |
| yccT | Complementary | 1027533 | 1028195 |
| | strand | | |
| yccU | | 1028368 | 1028781 |
| yccV | Complementary | 1028826 | 1029143 |
| | strand | | |
| yccW | Complementary | 1029201 | 1030304 |
| | strand | | |
| yccX | | 1030486 | 1030764 |
| yccK | Complementary | 1030761 | 1031090 |
| | strand | | |
| yccA | Complementary | 1031181 | 1031840 |
| | strand | | |
| serT | Complementary | 1032047 | 1032134 |
| | strand | | |
| hyaA | | 1032561 | 1033679 |
| hyaB | | 1033676 | 1035469 |
| hyaC | | 1035488 | 1036195 |
| hyaD | | 1036192 | 1036779 |
| hyaE | | 1036776 | 1037174 |
| hyaF | | 1037171 | 1038028 |
| appC | | 1038162 | 1039706 |
| appB | | 1039718 | 1040854 |
| appA | | 1041039 | 1042337 |
| yccC | Complementary | 1042452 | 1044632 |
| | strand | | |
| etp | Complementary | 1044652 | 1045098 |
| | strand | | |
| yccZ | Complementary | 1045086 | 1046225 |
| | strand | | |
| ymcA | Complementary | 1046271 | 1048367 |
| | strand | | |
| ymcB | Complementary | 1048367 | 1049113 |
| | strand | | |
| ymcC | Complementary | 1049110 | 1049754 |
| | strand | | |
| ymcD | Complementary | 1049861 | 1050166 |
| | strand | | |
| insA-4 | | 1050255 | 1050530 |
| insB-4 | | 1050449 | 1050952 |
| cspH | Complementary | 1051385 | 1051597 |
| | strand | | |
| cspG | | 1051883 | 1052095 |
| ymcE | | 1052269 | 1052499 |
| gnsA | | 1052489 | 1052662 |
| yccM | Complementary | 1052711 | 1053784 |
| | strand | | |
| torS | Complementary | 1053856 | 1056600 |
| | strand | | |
| torT | | 1056683 | 1057711 |
| torR | Complementary | 1057684 | 1058376 |
| | strand | | |
| torC | | 1058506 | 1059678 |
| torA | | 1059678 | 1062224 |
| torD | | 1062221 | 1062820 |
| cbpM | Complementary | 1062972 | 1063277 |
| | strand | | |
| cbpA | Complementary | 1063277 | 1064197 |
| | strand | | |
| yccE | | 1064458 | 1065714 |
| agp | | 1066007 | 1067248 |
| yccJ | Complementary | 1067286 | 1067513 |
| | strand | | |
| wrbA | Complementary | 1067534 | 1068130 |
| | strand | | |
| ymdF | | 1068503 | 1068676 |
| ycdG | Complementary | 1068933 | 1070261 |
| | strand | | |
| ycdH | Complementary | 1070282 | 1070776 |
| | strand | | |
| ycdI | Complementary | 1070787 | 1071377 |
| | strand | | |
| rarA | Complementary | 1071387 | 1072187 |
| | strand | | |
| ycdK | Complementary | 1072195 | 1072581 |
| | strand | | |
| ycdL | Complementary | 1072593 | 1073285 |
| | strand | | |
| ycdM | Complementary | 1073285 | 1074433 |
| | strand | | |
| ycdC | | 1074664 | 1075302 |
| putA | Complementary | 1075342 | 1079304 |
| | strand | | |
| putP | | 1079727 | 1081235 |
| ycdN_1 | | 1081778 | 1081888 |
| ycdN_2 | | 1081876 | 1082607 |
| ycdO | | 1082665 | 1083792 |
| ycdB | | 1083798 | 1085069 |
| phoH | | 1085414 | 1086478 |
| ycdP | Complementary | 1086528 | 1086941 |
| | strand | | |
| ycdQ | Complementary | 1086943 | 1088268 |
| | strand | | |
| ycdR | Complementary | 1088261 | 1090279 |
| | strand | | |
| ycdS | Complementary | 1090288 | 1092711 |
| | strand | | |
| ycdT | | 1093298 | 1094656 |
| insF-4 | Complementary | 1094697 | 1095563 |
| | strand | | |
| insE-4 | Complementary | 1095560 | 1095868 |
| | strand | | |
| ymdE | | 1095966 | 1096268 |
| ycdU | | 1096265 | 1097251 |
| serX | Complementary | 1097806 | 1097893 |
| | strand | | |
| ycdW | | 1098127 | 1099065 |
| ycdX | | 1099120 | 1099857 |
| ycdY | | 1099881 | 1100435 |
| ycdZ | | 1100537 | 1101028 |
| csgG | Complementary | 1101092 | 1101925 |
| | strand | | |
| csgF | Complementary | 1101952 | 1102368 |
| | strand | | |
| csgE | Complementary | 1102393 | 1102782 |
| | strand | | |
| csgD | Complementary | 1102787 | 1103437 |
| | strand | | |
| csgB | | 1104192 | 1104647 |
| csgA | | 1104688 | 1105143 |
| csgC | | 1105202 | 1105534 |
| insD | Complementary | 1105633 | 1106556 |
| | strand | | |
| insC | Complementary | 1106496 | 1106861 |
| | strand | | |
| ymdA | | 1106991 | 1107302 |
| ymdB | | 1107397 | 1107930 |
| ymdC | | 1107932 | 1109353 |
| mdoC | Complementary | 1109361 | 1110518 |
| | strand | | |
| mdoG | | 1110912 | 1112447 |
| mdoH | | 1112440 | 1114983 |
| yceK | | 1115156 | 1115383 |
| msyB | Complementary | 1115384 | 1115758 |
| | strand | | |
| mdtG | Complementary | 1115841 | 1117067 |
| | strand | | |
| lpxL | Complementary | 1117239 | 1118159 |
| | strand | | |
| yceA | | 1118384 | 1119436 |
| yceI | Complementary | 1119478 | 1120053 |
| | strand | | |
| yceJ | Complementary | 1120057 | 1120623 |
| | strand | | |
| yceO | Complementary | 1120884 | 1121024 |
| | strand | | |
| solA | Complementary | 1121045 | 1122163 |
| | strand | | |
| yceP | Complementary | 1122278 | 1122532 |
| | strand | | |
| dinI | Complementary | 1122819 | 1123064 |
| | strand | | |
| pyrC | Complementary | 1123138 | 1124184 |
| | strand | | |
| yceB | Complementary | 1124290 | 1124850 |
| | strand | | |
| grxB | Complementary | 1124984 | 1125631 |
| | strand | | |
| mdlH | Complementary | 1125695 | 1126903 |
| | strand | | |
| rimJ | | 1127139 | 1127723 |
| yceH | | 1127734 | 1128381 |
| mviM | | 1128383 | 1129306 |
| mviN | | 1129416 | 1130951 |
| flgN | Complementary | 1130991 | 1131407 |
| | strand | | |
| flgM | Complementary | 1131412 | 1131705 |
| | strand | | |
| flgA | Complementary | 1131781 | 1132440 |
| | strand | | |
| flgB | | 1132595 | 1133011 |
| flgC | | 1133015 | 1133419 |
| flgD | | 1133431 | 1134126 |
| flgE | | 1134151 | 1135359 |
| flgF | | 1135379 | 1136134 |
| flgG | | 1136306 | 1137088 |
| flgH | | 1137141 | 1137839 |
| flgI | | 1137851 | 1138948 |
| flgJ | | 1138948 | 1139889 |
| flgK | | 1139955 | 1141598 |
| flgL | | 1141610 | 1142563 |
| rne | Complementary | 1142759 | 1145944 |
| | strand | | |
| yceQ | | 1146079 | 1146399 |
| rluC | | 1146517 | 1147476 |
| yceF | Complementary | 1147588 | 1148172 |
| | strand | | |
| sraB | | 1148166 | 1148334 |
| yceD | | 1148371 | 1148892 |
| rpmF | | 1148944 | 1149117 |
| plsX | | 1149198 | 1150268 |
| fabH | | 1150336 | 1151289 |
| fabD | | 1151305 | 1152234 |
| fabG | | 1152247 | 1152981 |
| acpP | | 1153192 | 1153428 |
| fabF | | 1153516 | 1154757 |
| pabC | | 1154877 | 1155686 |
| yceG | | 1155689 | 1156711 |
| tmk | | 1156701 | 1157342 |
| holB | | 1157339 | 1158343 |
| ycfH | | 1158354 | 1159151 |
| ptsG | | 1159446 | 1160879 |
| fhuE | Complementary | 1160939 | 1163128 |
| | strand | | |
| hinT | | 1163462 | 1163821 |
| ycfL | | 1163824 | 1164201 |
| YcfM | | 1164215 | 1164856 |
| ycfN | | 1164837 | 1165661 |
| nagZ | | 1165672 | 1166697 |
| ycfP | | 1166720 | 1167262 |
| ndh | | 1167662 | 1168966 |
| ycfJ | | 1169176 | 1169715 |
| ycfQ | Complementary | 1169777 | 1170409 |
| | strand | | |
| ycfR | | 1170650 | 1170907 |
| ycfS | Complementary | 1170989 | 1171951 |
| | strand | | |
| mfd | Complementary | 1172095 | 1175541 |
| | strand | | |
| ycfT | Complementary | 1175689 | 1176742 |
| | strand | | |
| lolC | | 1177004 | 1178203 |
| lolD | | 1178196 | 1178897 |
| lolE | | 1178897 | 1180141 |
| ycfX | | 1180170 | 1181081 |
| cobB | | 1181097 | 1181936 |
| ycfZ | Complementary | 1182056 | 1182844 |
| | strand | | |
| ymfA | Complementary | 1182841 | 1183302 |
| | strand | | |
| potD | Complementary | 1183360 | 1184406 |
| | strand | | |
| potC | Complementary | 1184403 | 1185197 |
| | strand | | |
| potB | Complementary | 1185194 | 1186021 |
| | strand | | |
| potA | Complementary | 1186035 | 1187171 |
| | strand | | |
| pepT | | 1187421 | 1188647 |
| ycfD | Complementary | 1188696 | 1189817 |
| | strand | | |
| phoQ | Complementary | 1189893 | 1191353 |
| | strand | | |
| phoP | Complementary | 1191353 | 1192024 |
| | strand | | |
| purB | Complementary | 1192193 | 1193563 |
| | strand | | |
| hflD | Complementary | 1193567 | 1194208 |
| | strand | | |
| trmU | Complementary | 1194244 | 1195350 |
| | strand | | |
| ymfB | Complementary | 1195404 | 1195865 |
| | strand | | |
| ymfC | Complementary | 1195875 | 1196628 |
| | strand | | |
| icd | | 1196700 | 1197950 |
| ymfD | Complementary | 1198444 | 1199109 |
| | strand | | |
| ymfE | Complementary | 1199110 | 1199814 |
| | strand | | |
| lit | | 1200272 | 1201165 |
| intE | Complementary | 1201256 | 1202383 |
| | strand | | |
| ymfG | Complementary | 1202364 | 1202609 |
| | strand | | |
| ymfH | Complementary | 1202646 | 1202957 |
| | strand | | |
| ymfI | | 1203074 | 1203415 |
| ymfJ | Complementary | 1203353 | 1203661 |
| | strand | | |
| ymlK | Complementary | 1203836 | 1204510 |
| | strand | | |
| ymfT | | 1204601 | 1204801 |
| ymfL | | 1204833 | 1205402 |
| ymfM | | 1205399 | 1205737 |
| ymfN | | 1205747 | 1207114 |
| ymfR | | 1207126 | 1207308 |
| ymfO | | 1207308 | 1207781 |
| ymfP | | 1207837 | 1208499 |
| ymfQ | | 1208490 | 1209074 |
| ycfK | | 1209078 | 1209707 |
| ymfS | | 1209709 | 1210122 |
| tfaE | Complementary | 1210094 | 1210696 |
| | strand | | |
| stfE | Complementary | 1210696 | 1211232 |
| | strand | | |
| pin | | 1211262 | 1211816 |
| mcrA | | 1211923 | 1212756 |
| icdC | | 1213002 | 1213154 |
| elbA | Complementary | 1213257 | 1213580 |
| | strand | | |
| ycgX | Complementary | 1214280 | 1214684 |
| | strand | | |
| ycgE | Complementary | 1214905 | 1215636 |
| | strand | | |
| ycgF | Complementary | 1215841 | 1217052 |
| | strand | | |
| ycgZ | | 1217366 | 1217602 |
| ymgA | | 1217645 | 1217917 |
| ymgB | | 1217946 | 1218212 |
| ymgC | | 1218325 | 1218573 |
| ycgG | | 1218905 | 1220428 |
| ymgF | | 1220560 | 1220778 |
| ycgH_1 | | 1222378 | 1222698 |
| ycgH_2 | | 1222783 | 1223799 |
| ymgD | Complementary | 1223882 | 1224211 |
| | strand | | |
| ymgG | Complementary | 1224221 | 1224496 |
| | strand | | |
| ymgH | | 1225042 | 1225263 |
| ycgI | | 1225272 | 1225484 |
| minE | Complementary | 1225856 | 1226122 |
| | strand | | |
| minD | Complementary | 1226126 | 1226938 |
| | strand | | |
| minC | Complementary | 1226962 | 1227657 |
| | strand | | |
| ycgJ | | 1228177 | 1228545 |
| ycgK | Complementary | 1228648 | 1229049 |
| | strand | | |
| ycgL | | 1229258 | 1229584 |
| ycgM | | 1229656 | 1230315 |
| ycgN | | 1230407 | 1230853 |
| hlyE | Complementary | 1231060 | 1231971 |
| | strand | | |
| umuD | | 1232344 | 1232763 |
| umuC | | 1232763 | 1234031 |
| dsbB | Complementary | 1234077 | 1234607 |
| | strand | | |
| nhaB | Complementary | 1234753 | 1236294 |
| | strand | | |
| fadR | | 1236515 | 1237234 |
| ycgB | Complementary | 1237286 | 1238818 |
| | strand | | |
| dadA | | 1239148 | 1240446 |
| dadX | | 1240456 | 1241526 |
| cvrA | Complementary | 1241912 | 1243648 |
| | strand | | |
| ldcA | Complementary | 1243743 | 1244657 |
| | strand | | |
| emtA | | 1244757 | 1245368 |
| ycgR | Complementary | 1245370 | 1246104 |
| | strand | | |
| ymgE | | 1246305 | 1246559 |
| ycgY | | 1246737 | 1247177 |
| treA | Complementary | 1247256 | 1248953 |
| | strand | | |
| dhaH | Complementary | 1249273 | 1250691 |
| | strand | | |
| dhaL | Complementary | 1250702 | 1251334 |
| | strand | | |
| dhaK | Complementary | 1251345 | 1252415 |
| | strand | | |
| dhaR | | 1252643 | 1254562 |
| ycgV | Complementary | 1254662 | 1257529 |
| | strand | | |
| ychF | Complementary | 1258298 | 1259389 |
| | strand | | |
| pth | Complementary | 1259506 | 1260090 |
| | strand | | |
| ychH | | 1260368 | 1260646 |
| ychM | Complementary | 1260701 | 1262380 |
| | strand | | |
| prsA | Complementary | 1262505 | 1263452 |
| | strand | | |
| ispE | Complementary | 1263603 | 1264454 |
| | strand | | |
| lolB | Complementary | 1264454 | 1265077 |
| | strand | | |
| hemA | | 1265291 | 1266547 |
| prfA | | 1266589 | 1267671 |
| prmC | | 1267671 | 1268504 |
| ychQ | | 1268501 | 1268893 |
| ychA | | 1268897 | 1269706 |
| kdsA | | 1269742 | 1270596 |
| ldrA | Complementary | 1270745 | 1270852 |
| | strand | | |
| rdlA | | 1270900 | 1270966 |
| ldrB | Complementary | 1271280 | 1271387 |
| | strand | | |
| rdlB | | 1271435 | 1271500 |
| ldrC | Complementary | 1271815 | 1271922 |
| | strand | | |
| rdlC | | 1271970 | 1272037 |
| chaA | Complementary | 1272326 | 1273426 |
| | strand | | |
| chaB | | 1273696 | 1273926 |
| chaC | | 1274063 | 1274779 |
| ychN | Complementary | 1274823 | 1275176 |
| | strand | | |
| ychP | | 1275502 | 1276755 |
| narL | Complementary | 1276756 | 1277406 |
| | strand | | |
| narX | Complementary | 1277399 | 1279195 |
| | strand | | |
| narK | | 1279534 | 1280925 |
| narG | | 1281441 | 1285184 |
| narH | | 1285181 | 1286719 |
| narJ | | 1286716 | 1287426 |
| narl | | 1287426 | 1288103 |
| ychS | | 1288286 | 1288561 |
| rttR | Complementary | 1288643 | 1288813 |
| | strand | | |
| tpr | Complementary | 1288664 | 1288765 |
| | strand | | |
| tyrV | Complementary | 1288821 | 1288905 |
| | strand | | |
| tyrT | Complementary | 1289115 | 1289199 |
| | strand | | |
| purU | Complementary | 1289359 | 1290201 |
| | strand | | |
| ychJ | Complementary | 1290251 | 1290709 |
| | strand | | |
| rssA | | 1290783 | 1291727 |
| rssB | | 1291819 | 1292832 |
| galU | | 1293034 | 1293942 |
| hns | Complementary | 1294086 | 1294499 |
| | strand | | |
| tdk | | 1295104 | 1295721 |
| ychG_2 | Complementary | 1296003 | 1296593 |
| | strand | | |
| ychG_1 | Complementary | 1296545 | 1296775 |
| | strand | | |
| adhE | Complementary | 1297023 | 1299698 |
| | strand | | |
| ychE | | 1300175 | 1300822 |
| insC | | 1301130 | 1301495 |
| insD | | 1301435 | 1302358 |
| oppA | | 1302896 | 1304527 |
| oppB | | 1304613 | 1305533 |
| oppC | | 1305548 | 1306456 |
| oppD | | 1306468 | 1307481 |
| oppF | | 1307478 | 1308482 |
| yciU | Complementary | 1308535 | 1308864 |
| | strand | | |
| cis | Complementary | 1308899 | 1310359 |
| | strand | | |
| kch | Complementary | 1310730 | 1311983 |
| | strand | | |
| ycil | Complementary | 1312283 | 1312579 |
| | strand | | |
| tonB | | 1312803 | 1313522 |
| yciA | Complementary | 1313562 | 1313960 |
| | strand | | |
| yciB | Complementary | 1314065 | 1314604 |
| | strand | | |
| yciC | Complementary | 1314634 | 1315377 |
| | strand | | |
| ompW | | 1315734 | 1316372 |
| yciE | Complementary | 1316432 | 1316938 |
| | strand | | |
| yciF | Complementary | 1316984 | 1317484 |
| | strand | | |
| yciG | Complementary | 1317570 | 1317749 |
| | strand | | |
| trpA | Complementary | 1318130 | 1318936 |
| | strand | | |
| trpB | Complementary | 1318936 | 1320129 |
| | strand | | |
| trpC | Complementary | 1320141 | 1321499 |
| | strand | | |
| trpD | Complementary | 1321503 | 1323098 |
| | strand | | |
| trpE | Complementary | 1323098 | 1324660 |
| | strand | | |
| trpL | Complementary | 1324752 | 1324796 |
| | strand | | |
| yciV | | 1324934 | 1325815 |
| yciO | | 1325812 | 1326432 |
| yciQ | | 1326460 | 1328355 |
| rluB | | 1328566 | 1329441 |
| btuR | Complementary | 1329481 | 1330071 |
| | strand | | |
| yciK | Complementary | 1330068 | 1330826 |
| | strand | | |
| sohB | | 1331046 | 1332095 |
| yciN | Complementary | 1332131 | 1332382 |
| | strand | | |
| topA | | 1332762 | 1335359 |
| cysB | | 1335569 | 1336543 |
| yciX_1 | | 1336874 | 1337002 |
| yciX_2 | | 1336984 | 1337172 |
| acnA | | 1337545 | 1340220 |
| ribA | Complementary | 1340284 | 1340874 |
| | strand | | |
| pgpB | | 1341044 | 1341808 |
| yciS | | 1341957 | 1342265 |
| yciM | | 1342272 | 1343441 |
| pyrF | | 1343635 | 1344372 |
| yciH | | 1344372 | 1344698 |
| osmB | Complementary | 1344824 | 1345042 |
| | strand | | |
| yciT | Complementary | 1345311 | 1346060 |
| | strand | | |
| gmr | Complementary | 1346471 | 1348456 |
| | strand | | |
| rnb | Complementary | 1348692 | 1350626 |
| | strand | | |
| yciW | Complementary | 1350694 | 1351821 |
| | strand | | |
| fabl | Complementary | 1351965 | 1352753 |
| | strand | | |
| ycjD | Complementary | 1353121 | 1353474 |
| | strand | | |
| sapF | Complementary | 1353542 | 1354348 |
| | strand | | |
| sapD | Complementary | 1354350 | 1355342 |
| | strand | | |
| sapC | Complementary | 1355342 | 1356232 |
| | strand | | |
| sapB | Complementary | 1356219 | 1357184 |
| | strand | | |
| sapA | Complementary | 1357181 | 1358824 |
| | strand | | |
| ymjA | Complementary | 1359137 | 1359382 |
| | strand | | |
| puuP | Complementary | 1359516 | 1360901 |
| | strand | | |
| puuA | Complementary | 1361204 | 1362622 |
| | strand | | |
| puuD | | 1362834 | 1363598 |
| puuR | | 1363625 | 1364182 |
| puuC | | 1364457 | 1365944 |
| puuB | | 1365946 | 1367226 |
| puuE | | 1367264 | 1368529 |
| pspF | Complementary | 1368649 | 1369626 |
| | strand | | |
| pspA | | 1369793 | 1370461 |
| pspB | | 1370515 | 1370739 |
| pspC | | 1370739 | 1371098 |
| pspD | | 1371107 | 1371328 |
| pspE | | 1371403 | 1371717 |
| ycjM | | 1371930 | 1373609 |
| ycjN | | 1373623 | 1374915 |
| ycjO | | 1374936 | 1375817 |
| ycjP | | 1375804 | 1376646 |
| ycjQ | | 1376677 | 1377729 |
| ycjR | | 1377748 | 1378536 |
| ycjS | | 1378546 | 1379601 |
| ycjT | | 1379598 | 1381865 |
| ycjU | | 1381862 | 1382521 |
| ycjV | | 1382535 | 1383503 |
| ymjB | | 1383503 | 1383616 |
| ompG | | 1383661 | 1384566 |
| ycjW | Complementary | 1384677 | 1385675 |
| | strand | | |
| ycjX | | 1385831 | 1387228 |
| ycjF | | 1387225 | 1388286 |
| tyrR | | 1388434 | 1389975 |
| tpx | Complementary | 1390019 | 1390525 |
| | strand | | |
| ycjG | | 1390644 | 1391609 |
| mpaA | Complementary | 1391584 | 1392372 |
| | strand | | |
| ymjC | Complementary | 1392394 | 1392576 |
| | strand | | |
| ycjY | Complementary | 1392647 | 1393579 |
| | strand | | |
| ycjZ | | 1393705 | 1394604 |
| mppA | | 1394941 | 1396554 |
| ynal | Complementary | 1396605 | 1397636 |
| | strand | | |
| lnsH-4 | | 1397790 | 1398806 |
| ynaJ | | 1399079 | 1399336 |
| uspE | Complementary | 1399386 | 1400336 |
| | strand | | |
| fnr | Complementary | 1400488 | 1401240 |
| | strand | | |
| ogt | Complementary | 1401435 | 1401950 |
| | strand | | |
| abgT | Complementary | 1401961 | 1403487 |
| | strand | | |
| abgB | Complementary | 1403524 | 1404969 |
| | strand | | |
| abgA | Complementary | 1404969 | 1406279 |
| | strand | | |
| abgR | | 1406455 | 1407363 |
| isrA | Complementary | 1407366 | 1407523 |
| | strand | | |
| ydaL | | 1407693 | 1408256 |
| ydaM | Complementary | 1408277 | 1409509 |
| | strand | | |
| ydaN | | 1409764 | 1410747 |
| dbpA | | 1411225 | 1412598 |
| ydaO | Complementary | 1412727 | 1413662 |
| | strand | | |
| lntR | Complementary | 1413714 | 1414949 |
| | strand | | |
| ydaQ | Complementary | 1414951 | 1415166 |
| | strand | | |
| ydaC | Complementary | 1415245 | 1415454 |
| | strand | | |
| lar | Complementary | 1415447 | 1415641 |
| | strand | | |
| recT | Complementary | 1415698 | 1416507 |
| | strand | | |
| recE | Complementary | 1416500 | 1419100 |
| | strand | | |
| racC | Complementary | 1419202 | 1419477 |
| | strand | | |
| ydaE | Complementary | 1419552 | 1419722 |
| | strand | | |
| kll | Complementary | 1419722 | 1419943 |
| | strand | | |
| sleB | | 1420385 | 1420873 |
| ydaF | Complementary | 1420870 | 1421025 |
| | strand | | |
| ydaG | Complementary | 1421036 | 1421170 |
| | strand | | |
| racR | Complementary | 1421479 | 1421955 |
| | strand | | |
| ydaS | | 1422079 | 1422375 |
| ydaT | | 1422398 | 1422820 |
| ydaU | | 1422833 | 1423690 |
| ydaV | | 1423697 | 1424443 |
| ydaW | | 1424466 | 1425026 |
| rzpR | | 1425059 | 1425358 |
| rzoR | | 1425114 | 1425299 |
| trkG | | 1425496 | 1426953 |
| ynaK | | 1427091 | 1427354 |
| ydaY | | 1427335 | 1427694 |
| ynaA | | 1428168 | 1429196 |
| lomR_1 | | 1429172 | 1429327 |
| insH-5 | Complementary | 1429460 | 1430440 |
| | strand | | |
| lomR_2 | | 1430528 | 1430698 |
| stfR | | 1430763 | 1434125 |
| tfaR | | 1434125 | 1434700 |
| pinR | Complementary | 1434798 | 1435388 |
| | strand | | |
| ynaE | Complementary | 1435705 | 1435971 |
| | strand | | |
| uspF | Complementary | 1436899 | 1437333 |
| | strand | | |
| ompN | Complementary | 1437474 | 1438607 |
| | strand | | |
| micC | | 1438835 | 1438942 |
| ydbK | Complementary | 1438974 | 1442498 |
| | strand | | |
| ydbJ | | 1442772 | 1443038 |
| hslJ | Complementary | 1443035 | 1443457 |
| | strand | | |
| ldhA | Complementary | 1443568 | 1444557 |
| | strand | | |
| ydbH | | 1444765 | 1447404 |
| ynbE | | 1447401 | 1447586 |
| ydbL | | 1447594 | 1447920 |
| feaR | Complementary | 1448092 | 1448997 |
| | strand | | |
| feaB | | 1449233 | 1450732 |
| tynA | Complementary | 1450790 | 1453063 |
| | strand | | |
| maoC | Complementary | 1453311 | 1455356 |
| | strand | | |
| paaA | | 1455641 | 1456570 |
| paaB | | 1456582 | 1456869 |
| paaC | | 1456878 | 1457624 |
| paaD | | 1457639 | 1458136 |
| paaE | | 1458144 | 1459214 |
| paaF | | 1459211 | 1459978 |
| paaG | | 1459978 | 1460766 |
| paaH | | 1460768 | 1462195 |
| paaI | | 1462185 | 1462607 |
| paaJ | | 1462607 | 1463812 |
| paaK | | 1463839 | 1465152 |
| paaX | | 1465253 | 1466203 |
| paaY | | 1466185 | 1466775 |
| ydbA_1 | | 1467106 | 1469664 |
| insD-2 | Complementary | 1469635 | 1470540 |
| | strand | | |
| insC-2 | Complementary | 1470498 | 1470908 |
| | strand | | |
| insI-2 | | 1471072 | 1472223 |
| ydbA_2 | | 1472404 | 1475727 |
| ydbC | | 1475935 | 1476795 |
| ydbD | | 1476858 | 1479164 |
| ynbA | | 1479335 | 1479940 |
| ynbB | | 1479940 | 1480836 |
| ynbC | | 1480852 | 1482609 |
| ynbD | | 1482623 | 1483915 |
| azoR | Complementary | 1483969 | 1484574 |
| | strand | | |
| hrpA | | 1484832 | 1488677 |
| ydcF | | 1488949 | 1489749 |
| aldA | | 1489946 | 1491385 |
| gapC_2 | Complementary | 1491427 | 1491678 |
| | strand | | |
| gapC_1 | Complementary | 1491675 | 1492427 |
| | strand | | |
| cybB | | 1492616 | 1493146 |
| ydcA | | 1493391 | 1493564 |
| hokB | Complementary | 1493636 | 1493785 |
| | strand | | |
| mokB | Complementary | 1493676 | 1493843 |
| | strand | | |
| sokB | | 1493833 | 1493885 |
| trg | | 1494184 | 1495824 |
| ydcI | Complementary | 1495862 | 1496785 |
| | strand | | |
| ydcJ | | 1497002 | 1498345 |
| mdoD | | 1498600 | 1500225 |
| ydcH | | 1500365 | 1500589 |
| rimL | | 1500652 | 1501191 |
| ydcK | Complementary | 1501183 | 1502163 |
| | strand | | |
| tehA | | 1502287 | 1503279 |
| tehB | | 1503276 | 1503869 |
| ydcL | | 1504171 | 1504839 |
| yncK_1 | Complementary | 1504857 | 1505024 |
| | strand | | |
| yncK_2 | Complementary | 1505076 | 1505363 |
| | strand | | |
| ydcM | | 1505371 | 1506579 |
| ydcO | Complementary | 1506619 | 1507794 |
| | strand | | |
| ydcN | | 1507886 | 1508422 |
| ydcP | | 1508495 | 1510456 |
| yncJ | Complementary | 1510548 | 1510778 |
| | strand | | |
| yncN | | 1511000 | 1511176 |
| ydcQ | | 1511201 | 1511038 |
| ydcR | | 1511717 | 1513123 |
| ydcS | | 1513368 | 1514513 |
| ydcT | | 1514531 | 1515544 |
| ydcU | | 1515545 | 1516486 |
| ydcV | | 1516476 | 1517270 |
| ydcW | | 1517292 | 1518716 |
| ydcX | | 1519103 | 1519276 |
| ydcY | | 1519362 | 1519595 |
| ydcZ | Complementary | 1519596 | 1520045 |
| | strand | | |
| yncA | Complementary | 1520042 | 1520560 |
| | strand | | |
| yncB | | 1520741 | 1521778 |
| yncC | | 1521976 | 1522641 |
| yncD | Complementary | 1522677 | 1524779 |
| | strand | | |
| yncE | | 1525021 | 1526082 |
| ansP | Complementary | 1526195 | 1527694 |
| | strand | | |
| yncG | | 1527961 | 1528578 |
| yncH | | 1528654 | 1528866 |
| rhsE | | 1529604 | 1531652 |
| ydcD | | 1531636 | 1532118 |
| yncI | | 1532300 | 1533046 |
| yncM | | 1533090 | 1533290 |
| ydcC | | 1533530 | 1534666 |
| ydcE | | 1534766 | 1534999 |
| yddH | Complementary | 1534996 | 1535565 |
| | strand | | |
| nhoA | | 1535738 | 1536583 |
| yddE | Complementary | 1536679 | 1537572 |
| | strand | | |
| narV | Complementary | 1537651 | 1538331 |
| | strand | | |
| narW | Complementary | 1538328 | 1539023 |
| | strand | | |
| narY | Complementary | 1539023 | 1540567 |
| | strand | | |
| narZ | Complementary | 1540564 | 1544304 |
| | strand | | |
| narU | Complementary | 1544386 | 1545774 |
| | strand | | |
| yddJ | Complementary | 1546098 | 1546433 |
| | strand | | |
| yddK | Complementary | 1546472 | 1547428 |
| | strand | | |
| yddL | Complementary | 1547452 | 1547742 |
| | strand | | |
| yddG | Complementary | 1548002 | 1548826 |
| | strand | | |
| fdnG | | 1549115 | 1552162 |
| fdnH | | 1552175 | 1553059 |
| fdnI | | 1553052 | 1553705 |
| yddM | Complementary | 1554112 | 1554474 |
| | strand | | |
| adhP | Complementary | 1554542 | 1555552 |
| | strand | | |
| sfcA | Complementary | 1555686 | 1557383 |
| | strand | | |
| sra | Complementary | 1557540 | 1557677 |
| | strand | | |
| bdm | Complementary | 1557779 | 1557994 |
| | strand | | |
| osmC | | 1558339 | 1558770 |
| ddpF | Complementary | 1558826 | 1559752 |
| | strand | | |
| ddpD | Complementary | 1559745 | 1560731 |
| | strand | | |
| ddpC | Complementary | 1560728 | 1561624 |
| | strand | | |
| ddpB | Complementary | 1561621 | 1562643 |
| | strand | | |
| ddpA | Complementary | 1562645 | 1564195 |
| | strand | | |
| ddpX | Complementary | 1564209 | 1564790 |
| | strand | | |
| dos | Complementary | 1565048 | 1567447 |
| | strand | | |
| yddV | Complementary | 1567472 | 1568515 |
| | strand | | |
| yddW | Complementary | 1569218 | 1570537 |
| | strand | | |
| gadC | Complementary | 1570668 | 1572203 |
| | strand | | |
| gadB | Complementary | 1572359 | 1573759 |
| | strand | | |
| pqqL | Complementary | 1574121 | 1576916 |
| | strand | | |
| yddB | Complementary | 1576961 | 1579333 |
| | strand | | |
| yddA | Complementary | 1579371 | 1581056 |
| | strand | | |
| ydeM | Complementary | 1581347 | 1582504 |
| | strand | | |
| ydeN | Complementary | 1582556 | 1584238 |
| | strand | | |
| ydeO | Complementary | 1584640 | 1585401 |
| | strand | | |
| ydeP | Complementary | 1585921 | 1588200 |
| | strand | | |
| ydeQ | Complementary | 1588534 | 1589448 |
| | strand | | |
| ydeR | Complementary | 1589507 | 1590010 |
| | strand | | |
| ydeS | Complementary | 1590023 | 1590553 |
| | strand | | |
| ydeT | Complementary | 1590567 | 1591715 |
| | strand | | |
| yneL | Complementary | 1592071 | 1592250 |
| | strand | | |
| hipA | Complementary | 1592568 | 1593890 |
| | strand | | |
| hipB | Complementary | 1593890 | 1594156 |
| | strand | | |
| ydeU | Complementary | 1594379 | 1595779 |
| | strand | | |
| ydeK | Complementary | 1595823 | 1599800 |
| | strand | | |
| ydeV | Complementary | 1600331 | 1601923 |
| | strand | | |
| ydeW | Complementary | 1602002 | 1602955 |
| | strand | | |
| ego | | 1603204 | 1604739 |
| lsrC | | 1604733 | 1605761 |
| lsrD | | 1605761 | 1606753 |
| lsrB | | 1606765 | 1607787 |
| lsrF | | 1607814 | 1608689 |
| lsrG | | 1608713 | 1609003 |
| tam | | 1609060 | 1609818 |
| yneE | Complementary | 1609822 | 1610736 |
| | strand | | |
| uxaB | Complementary | 1610943 | 1612394 |
| | strand | | |
| yneF | Complementary | 1612621 | 1613568 |
| | strand | | |
| yneG | Complementary | 1613680 | 1614039 |
| | strand | | |
| yneH | Complementary | 1614039 | 1614965 |
| | strand | | |
| yneI | Complementary | 1615029 | 1616417 |
| | strand | | |
| yneJ | | 1616518 | 1617399 |
| yneK | | 1617477 | 1618592 |
| ydeA | | 1618742 | 1619932 |
| marC | Complementary | 1619957 | 1620622 |
| | strand | | |
| marR | | 1620834 | 1621268 |
| marA | | 1621288 | 1621671 |
| marB | | 1621703 | 1621921 |
| eamA | Complementary | 1621952 | 1622851 |
| | strand | | |
| ydeE | | 1623046 | 1624233 |
| ydeH | Complementary | 1624674 | 1625564 |
| | strand | | |
| ydeI | Complementary | 1625819 | 1626211 |
| | strand | | |
| ydeJ | | 1626487 | 1627005 |
| dcp | Complementary | 1627049 | 1629094 |
| | strand | | |
| ydfG | | 1629231 | 1629977 |
| ydfH | | 1630066 | 1630752 |
| ydfZ | | 1630929 | 1631132 |
| ydfI | Complementary | 1631167 | 1632627 |
| | strand | | |
| ydfJ | Complementary | 1632716 | 1633999 |
| | strand | | |
| ydfK | | 1634753 | 1635019 |
| pinQ | | 1635336 | 1635926 |
| tfaQ | Complementary | 1636024 | 1636599 |
| | strand | | |
| stfQ | Complementary | 1636599 | 1637561 |
| | strand | | |
| nohA | Complementary | 1637512 | 1638081 |
| | strand | | |
| ynfO | | 1638470 | 1638703 |
| ydfO | | 1638761 | 1639171 |
| gnsB | Complementary | 1639323 | 1639496 |
| | strand | | |
| ynfN | Complementary | 1639668 | 1639823 |
| | strand | | |
| cspI | Complementary | 1640169 | 1640381 |
| | strand | | |
| ydfP | Complementary | 1640744 | 1641241 |
| | strand | | |
| ydfQ | Complementary | 1641238 | 1641771 |
| | strand | | |
| ydfR | Complementary | 1641768 | 1642079 |
| | strand | | |
| essQ | Complementary | 1642084 | 1642299 |
| | strand | | |
| cspB | Complementary | 1643053 | 1643268 |
| | strand | | |
| cspF | | 1643569 | 1643781 |
| ydfT | Complementary | 1644203 | 1644955 |
| | strand | | |
| ydfU | Complementary | 1644969 | 1646018 |
| | strand | | |
| rem | Complementary | 1646365 | 1646616 |
| | strand | | |
| hokD | Complementary | 1646833 | 1646988 |
| | strand | | |
| relE | Complementary | 1647060 | 1647347 |
| | strand | | |
| relB | Complementary | 1647347 | 1647586 |
| | strand | | |
| ydfV | | 1647611 | 1647916 |
| flxA | | 1648119 | 1648451 |
| ydfW | Complementary | 1648888 | 1649037 |
| | strand | | |
| ydfX | Complementary | 1649060 | 1649350 |
| | strand | | |
| dicC | Complementary | 1649334 | 1649564 |
| | strand | | |
| dicA | | 1649648 | 1650055 |
| ydfA | | 1650222 | 1650377 |
| ydfB | | 1650379 | 1650507 |
| ydfC | | 1650537 | 1650755 |
| dicF | | 1651096 | 1651148 |
| dicB | | 1651323 | 1651511 |
| ydfD | | 1651508 | 1651699 |
| ydfE | | 1651792 | 1652712 |
| insD | | 1652595 | 1653251 |
| intQ | | 1653226 | 1654422 |
| ynfP | Complementary | 1654442 | 1654552 |
| | strand | | |
| rspB | Complementary | 1654610 | 1655629 |
| | strand | | |
| rspA | Complementary | 1655641 | 1656855 |
| | strand | | |
| ynfA | Complementary | 1657061 | 1657387 |
| | strand | | |
| ynfB | | 1657522 | 1657863 |
| speG | | 1657898 | 1658458 |
| ynfC | Complementary | 1658461 | 1659171 |
| | strand | | |
| ynfD | | 1659279 | 1659584 |
| ynfE | | 1659783 | 1662209 |
| ynfF | | 1662270 | 1664693 |
| ynfG | | 1664704 | 1665321 |
| ynfH | | 1665323 | 1666177 |
| dmsD | | 1666220 | 1666834 |
| clcB | | 1667029 | 1668285 |
| ynfK | Complementary | 1668238 | 1668933 |
| | strand | | |
| dgsA | Complementary | 1669058 | 1670278 |
| | strand | | |
| ynfL | Complementary | 1670413 | 1671306 |
| | strand | | |
| ynfM | | 1671413 | 1672666 |
| asr | | 1673090 | 1673398 |
| ydgD | | 1673674 | 1674495 |
| mdtI | Complementary | 1674534 | 1674863 |
| | strand | | |
| mdtJ | Complementary | 1674850 | 1675215 |
| | strand | | |
| ydgG | | 1675627 | 1676661 |
| pntB | Complementary | 1676686 | 1678074 |
| | strand | | |
| pntA | Complementary | 1678085 | 1679617 |
| | strand | | |
| ydgH | | 1680141 | 1681085 |
| ydgI | | 1681271 | 1682653 |
| folM | | 1682690 | 1683412 |
| ydgC | Complementary | 1683409 | 1683744 |
| | strand | | |
| rstA | | 1683864 | 1684592 |
| rstB | | 1684596 | 1685897 |
| tus | | 1685973 | 1686902 |
| fumC | Complementary | 1686899 | 1688302 |
| | strand | | |
| fumA | Complementary | 1688445 | 1690091 |
| | strand | | |
| manA | | 1690290 | 1691465 |
| ydgA | | 1691566 | 1693074 |
| uidC | Complementary | 1693300 | 1694565 |
| | strand | | |
| uidB | Complementary | 1694604 | 1695977 |
| | strand | | |
| uidA | Complementary | 1695974 | 1697785 |
| | strand | | |
| uidR | Complementary | 1698176 | 1698766 |
| | strand | | |
| hdhA | Complementary | 1698987 | 1699754 |
| | strand | | |
| malI | Complementary | 1699866 | 1709894 |
| | strand | | |
| malX | | 1701069 | 1702661 |
| malY | | 1702671 | 1703843 |
| add | | 1703947 | 1704948 |
| ydgJ | Complementary | 1704982 | 1706022 |
| | strand | | |
| blr | | 1706265 | 1706390 |
| ydgT | | 1706663 | 1706878 |
| ydgK | | 1706964 | 1707404 |
| rsxA | | 1707481 | 1708062 |
| rsxB | | 1708062 | 1708640 |
| rsxC | | 1708633 | 1710855 |
| rsxD | | 1710856 | 1711914 |
| rsxG | | 1711918 | 1712538 |
| rsxE | | 1712542 | 1713237 |
| nth | | 1713237 | 1713872 |
| ydgR | | 1714483 | 1715985 |
| gst | | 1716091 | 1716696 |
| pdxY | Complementary | 1716740 | 1717803 |
| | strand | | |
| tyrS | Complementary | 1717662 | 1718936 |
| | strand | | |
| pdxH | Complementary | 1719065 | 1719721 |
| | strand | | |
| ydhA | Complementary | 1719780 | 1720109 |
| | strand | | |
| ydhH | Complementary | 1720207 | 1721316 |
| | strand | | |
| slyB | | 1721590 | 1722057 |
| slyA | Complementary | 1722104 | 1722538 |
| | strand | | |
| ydhI | | 1722739 | 1722975 |
| ydhJ | | 1722978 | 1723835 |
| ydhK | | 1723835 | 1725847 |
| sodC | Complementary | 1725848 | 1726369 |
| | strand | | |
| ydhF | Complementary | 1726450 | 1727346 |
| | strand | | |
| ydhL | Complementary | 1727395 | 1727634 |
| | strand | | |
| ydhM | | 1727821 | 1728336 |
| nemA | | 1728373 | 1729470 |
| gloA | | 1729551 | 1729958 |
| rnt | | 1730061 | 1730708 |
| lhr | | 1730801 | 1735417 |
| ydhD | Complementary | 1735468 | 1735815 |
| | strand | | |
| ydhO | | 1736149 | 1736964 |
| sodB | | 1737092 | 1737673 |
| ydhP | Complementary | 1737835 | 1739004 |
| | strand | | |
| purR | | 1739558 | 1740583 |
| ydhB | Complementary | 1740580 | 1741512 |
| | strand | | |
| ydhC | | 1741625 | 1742836 |
| cfa | | 1743127 | 1744275 |
| ribC | Complementary | 1744315 | 1744956 |
| | strand | | |
| mdtK | | 1745171 | 1746544 |
| ydhQ | Complementary | 1746585 | 1747841 |
| | strand | | |
| valV | | 1748149 | 1748225 |
| valW | | 1748230 | 1748306 |
| ydhR | | 1748414 | 1748719 |
| ydhS | | 1748845 | 1750449 |
| ydhT | Complementary | 1750461 | 1751273 |
| | strand | | |
| ydhU | Complementary | 1751277 | 1752062 |
| | strand | | |
| ydhX | Complementary | 1752059 | 1752727 |
| | strand | | |
| ydhW | Complementary | 1752791 | 1753438 |
| | strand | | |
| ydhV | Complementary | 1753442 | 1755544 |
| | strand | | |
| ydhY | Complementary | 1755565 | 1756191 |
| | strand | | |
| ydhZ | Complementary | 1756646 | 1756855 |
| | strand | | |
| pykF | | 1757412 | 1758824 |
| lpp | | 1759135 | 1769371 |
| ynhG | Complementary | 1759435 | 1760439 |
| | strand | | |
| sufE | Complementary | 1760588 | 1761004 |
| | strand | | |
| sufS | Complementary | 1761017 | 1762237 |
| | strand | | |
| sufD | Complementary | 1762234 | 1763505 |
| | strand | | |
| sufC | Complementary | 1763480 | 1764226 |
| | strand | | |
| sufB | Complementary | 1764236 | 1765723 |
| | strand | | |
| sufA | Complementary | 1765732 | 1766100 |
| | strand | | |
| rydB | Complementary | 1766427 | 1766494 |
| | strand | | |
| ydiH | Complementary | 1766648 | 1766917 |
| | strand | | |
| ydiI | Complementary | 1766936 | 1767346 |
| | strand | | |
| ydiJ | Complementary | 1767343 | 1770399 |
| | strand | | |
| ydiK | | 1770788 | 1771900 |
| rprA | | 1772086 | 1772190 |
| ydiL | | 1772329 | 1772685 |
| ydiM | | 1772785 | 1773999 |
| ydiN | | 1774226 | 1775491 |
| ydiB | | 1775503 | 1776369 |
| aroD | | 1776400 | 1777158 |
| ydiF | | 1777301 | 1778896 |
| ydiO | | 1778910 | 1780061 |
| ydiP | Complementary | 1780104 | 1781015 |
| | strand | | |
| ydiQ | | 1781331 | 1782095 |
| ydiR | | 1782115 | 1783053 |
| ydiS | | 1783109 | 1784398 |
| ydiT | | 1784395 | 1784688 |
| ydiD | | 1784691 | 1786391 |
| pps | Complementary | 1786448 | 1788826 |
| | strand | | |
| ydiA | | 1789159 | 1789992 |
| aroH | | 1790149 | 1791195 |
| ydiE | | 1791327 | 1791518 |
| ydiU | Complementary | 1791522 | 1792958 |
| | strand | | |
| ydiV | Complementary | 1793021 | 1793734 |
| | strand | | |
| nlpC | Complementary | 1793981 | 1794445 |
| | strand | | |
| btuD | Complementary | 1794523 | 1795272 |
| | strand | | |
| btuE | Complementary | 1795272 | 1795823 |
| | strand | | |
| btuC | Complementary | 1795886 | 1790866 |
| | strand | | |
| ihfA | Complementary | 1796967 | 1797266 |
| | strand | | |
| pheT | Complementary | 1797271 | 1799658 |
| | strand | | |
| pheS | Complementary | 1799673 | 1800056 |
| | strand | | |
| pheM | Complementary | 1800940 | 1800984 |
| | strand | | |
| rplT | Complementary | 1801107 | 1801463 |
| | strand | | |
| rpmI | Complementary | 1801516 | 1801713 |
| | strand | | |
| infC | Complementary | 1801810 | 1802352 |
| | strand | | |
| thrS | Complementary | 1802356 | 1804284 |
| | strand | | |
| arpB_1 | | 1804808 | 1805281 |
| arpB_2 | | 1805292 | 1806707 |
| yniD | | 1806864 | 1806986 |
| ydiY | Complementary | 1807039 | 1807797 |
| | strand | | |
| pfkB | | 1808084 | 1809013 |
| ydiZ | | 1809114 | 1809404 |
| yniA | | 1809510 | 1810370 |
| yniB | Complementary | 1810411 | 1810947 |
| | strand | | |
| yniC | | 1811094 | 1811762 |
| ydjM | | 1811925 | 1812515 |
| ydjN | | 1812648 | 1814039 |
| ydjO | Complementary | 1814043 | 1814858 |
| | strand | | |
| cedA | Complementary | 1815135 | 1815398 |
| | strand | | |
| katE | | 1815581 | 1817842 |
| chbG | Complementary | 1818100 | 1818849 |
| | strand | | |
| chbF | Complementary | 1818862 | 1820214 |
| | strand | | |
| chbR | Complementary | 1820319 | 1821161 |
| | strand | | |
| chbA | Complementary | 1821169 | 1821519 |
| | strand | | |
| chbC | Complementary | 1821570 | 1822928 |
| | strand | | |
| chbB | Complementary | 1823013 | 1823333 |
| | strand | | |
| osmE | Complementary | 1823632 | 1823970 |
| | strand | | |
| nadE | | 1824172 | 1824999 |
| ydjQ | | 1825229 | 1826116 |
| ydjR | Complementary | 1826076 | 1826651 |
| | strand | | |
| spy | Complementary | 1826854 | 1827339 |
| | strand | | |
| astE | Complementary | 1827669 | 1828637 |
| | strand | | |
| astB | Complementary | 1828630 | 1829973 |
| | strand | | |
| astD | Complementary | 1829970 | 1831448 |
| | strand | | |
| astA | Complementary | 1831445 | 1832479 |
| | strand | | |
| astC | Complementary | 1832476 | 1833696 |
| | strand | | |
| xthA | | 1834142 | 1834948 |
| ydjX | | 1835115 | 1835825 |
| ydjY | | 1835830 | 1836507 |
| ydjZ | | 1836522 | 1837229 |
| ynjA | | 1837229 | 1837777 |
| ynjB | | 1837787 | 1838953 |
| ynjC | | 1838971 | 1840461 |
| ynjD | | 1840461 | 1841114 |
| ynjE | | 1841181 | 1842488 |
| ynjF | Complementary | 1842497 | 1843117 |
| | strand | | |
| nudG | | 1843204 | 1843611 |
| ynjH | Complementary | 1843577 | 1843849 |
| | strand | | |
| gdhA | | 1844085 | 1845428 |
| ynjI | Complementary | 1845545 | 1846585 |
| | strand | | |
| topB | Complementary | 1846713 | 1848674 |
| | strand | | |
| selD | Complementary | 1848679 | 1849722 |
| | strand | | |
| ydjA | Complementary | 1849839 | 1850390 |
| | strand | | |
| sppA | | 1850551 | 1852407 |
| ansA | | 1852574 | 1853590 |
| pnoA | | 1853601 | 1854242 |
| ydjE | Complementary | 1854335 | 1855693 |
| | strand | | |
| ydjF | Complementary | 1855810 | 1856568 |
| | strand | | |
| ydjG | Complementary | 1856705 | 1857685 |
| | strand | | |
| ydjH | Complementary | 1857695 | 1858642 |
| | strand | | |
| ydjI | Complementary | 1858647 | 1859483 |
| | strand | | |
| ydjJ | Complementary | 1859504 | 1860547 |
| | strand | | |
| ydjK | Complementary | 1860564 | 1861943 |
| | strand | | |
| ydjL | Complementary | 1861970 | 1863046 |
| | strand | | |
| yeaC | Complementary | 1863416 | 1863688 |
| | strand | | |
| yeaA | Complementary | 1863730 | 1864143 |
| | strand | | |
| gapA | | 1864485 | 1865480 |
| yeaD | | 1865564 | 1866448 |
| yeaE | Complementary | 1866496 | 1867350 |
| | strand | | |
| mipA | Complementary | 1867440 | 1868186 |
| | strand | | |
| yeaG | | 1868622 | 1870556 |
| yeaH | | 1870669 | 1871952 |
| yeaI | | 1872099 | 1873574 |
| yeaJ | | 1873755 | 1875245 |
| yeaK | | 1875288 | 1875791 |
| yoaI | Complementary | 1875792 | 1875896 |
| | strand | | |
| yeaL | | 1876066 | 1876512 |
| yeaM | Complementary | 1876469 | 1877290 |
| | strand | | |
| yeaN | | 1877387 | 1878568 |
| yeaO | | 1878623 | 1878970 |
| yoaF | Complementary | 1878992 | 1879246 |
| | strand | | |
| yeaP | | 1879429 | 1880454 |
| yeaQ | Complementary | 1880721 | 1880969 |
| | strand | | |
| yoaG | Complementary | 1881117 | 1881299 |
| | strand | | |
| yeaR | Complementary | 1881303 | 1881662 |
| | strand | | |
| yeaS | Complementary | 1881835 | 1882473 |
| | strand | | |
| yeaT | Complementary | 1882600 | 1883523 |
| | strand | | |
| yeaU | | 1883626 | 1884711 |
| yeaV | | 1884902 | 1886347 |
| yeaW | | 1886379 | 1887503 |
| yeaX | | 1887559 | 1888524 |
| rnd | Complementary | 1888578 | 1889705 |
| | strand | | |
| fadD | Complementary | 1889775 | 1891460 |
| | strand | | |
| yeaY | Complementary | 1891665 | 1892246 |
| | strand | | |
| yeaZ | Complementary | 1892286 | 1892981 |
| | strand | | |
| yoaA | Complementary | 1893039 | 1894949 |
| | strand | | |
| yoaB | | 1895081 | 1895425 |
| yoaC | | 1895787 | 1896146 |
| yoaH | Complementary | 1896266 | 1896445 |
| | strand | | |
| pabB | | 1896519 | 1897880 |
| yeaB | | 1897884 | 1898462 |
| sdaA | | 1898646 | 1900010 |
| yoaD | | 1900141 | 1901739 |
| yoaE | Complementary | 1901743 | 1903299 |
| | strand | | |
| manX | | 1903762 | 1904733 |
| manY | | 1904796 | 1905596 |
| manZ | | 1905600 | 1906460 |
| yobD | | 1906515 | 1906973 |
| yebN | | 1907402 | 1907968 |
| rrmA | Complementary | 1907965 | 1908774 |
| | strand | | |
| cspC | Complementary | 1908940 | 1909149 |
| | strand | | |
| yobF | Complementary | 1909162 | 1909305 |
| | strand | | |
| yebO | Complementary | 1909975 | 1910262 |
| | strand | | |
| yobG | Complementary | 1910337 | 1910480 |
| | strand | | |
| yobH | | 1910639 | 1910878 |
| kdgR | Complementary | 1911022 | 1911813 |
| | strand | | |
| yebQ | | 1911990 | 1913363 |
| htpX | Complementary | 1913409 | 1914290 |
| | strand | | |
| prc | Complementary | 1914482 | 1916530 |
| | strand | | |
| proQ | Complementary | 1916550 | 1917248 |
| | strand | | |
| yebR | Complementary | 1917345 | 1917896 |
| | strand | | |
| yebS | | 1917972 | 1919255 |
| yebT | | 1919224 | 1921857 |
| yebU | | 1921937 | 1923376 |
| yebV | | 1923494 | 1923730 |
| yebW | | 1923835 | 1924026 |
| pphA | Complementary | 1924027 | 1924683 |
| | strand | | |
| ryeA | | 1924780 | 1925028 |
| ryeB | Complementary | 1924878 | 1924998 |
| | strand | | |
| yebY | Complementary | 1925079 | 1925420 |
| | strand | | |
| yebZ | Complementary | 1925433 | 1926305 |
| | strand | | |
| yobA | Complementary | 1926309 | 1926683 |
| | strand | | |
| holE | | 1926822 | 1927052 |
| yobB | | 1927154 | 1927810 |
| exoX | | 1927834 | 1928496 |
| ptrB | Complementary | 1928493 | 1930553 |
| | strand | | |
| yebE | Complementary | 1930762 | 1931421 |
| | strand | | |
| yebF | Complementary | 1931748 | 1932116 |
| | strand | | |
| yebG | Complementary | 1932171 | 1932461 |
| | strand | | |
| purT | | 1932595 | 1933773 |
| eda | Complementary | 1933829 | 1934470 |
| | strand | | |
| edd | Complementary | 1934507 | 1936318 |
| | strand | | |
| zwf | Complementary | 1936553 | 1938028 |
| | strand | | |
| yebK | | 1938366 | 1939235 |
| pykA | | 1939363 | 1940805 |
| lpxM | Complementary | 1940936 | 1941907 |
| | strand | | |
| yebA | Complementary | 1942027 | 1943349 |
| | strand | | |
| znuA | Complementary | 1943365 | 1944297 |
| | strand | | |
| znuC | | 1944376 | 1945131 |
| znuB | | 1945128 | 1945913 |
| ruvB | Complementary | 1946060 | 1947070 |
| | strand | | |
| ruvA | Complementary | 1947079 | 1947690 |
| | strand | | |
| yebB | | 1947965 | 1948567 |
| ruvC | Complementary | 1948569 | 1949090 |
| | strand | | |
| yebC | Complementary | 1949125 | 1949865 |
| | strand | | |
| nudB | Complementary | 1949894 | 1950346 |
| | strand | | |
| aspS | Complementary | 1950464 | 1952236 |
| | strand | | |
| yecD | | 1952546 | 1953112 |
| yecE | | 1953109 | 1953927 |
| yecN | | 1953980 | 1954375 |
| yecO | | 1954416 | 1955159 |
| yecP | | 1955156 | 1956127 |
| torZ | Complementary | 1956292 | 1958721 |
| | strand | | |
| torY | Complementary | 1958746 | 1959846 |
| | strand | | |
| cutC | Complementary | 1960234 | 1960980 |
| | strand | | |
| yecM | Complementary | 1960994 | 1961560 |
| | strand | | |
| argS | | 1961776 | 1963509 |
| yecT | | 1963686 | 1964174 |
| flhE | Complementary | 1964294 | 1964686 |
| | strand | | |
| flhA | Complementary | 1964686 | 1966764 |
| | strand | | |
| flhB | Complementary | 1966757 | 1967905 |
| | strand | | |
| cheZ | Complementary | 1968107 | 1968751 |
| | strand | | |
| cheY | Complementary | 1968762 | 1969151 |
| | strand | | |
| cheB | Complementary | 1969166 | 1970215 |
| | strand | | |
| cheR | Complementary | 1970218 | 1971078 |
| | strand | | |
| tap | Complementary | 1971097 | 1972698 |
| | strand | | |
| tar | Complementary | 1972744 | 1974405 |
| | strand | | |
| cheW | Complementary | 1974550 | 1975053 |
| | strand | | |
| cheA | Complementary | 1975074 | 1977038 |
| | strand | | |
| motB | Complementary | 1977043 | 1977969 |
| | strand | | |
| motA | Complementary | 1977966 | 1978853 |
| | strand | | |
| flhC | Complementary | 1978980 | 1979558 |
| | strand | | |
| flhD | Complementary | 1979561 | 1979920 |
| | strand | | |
| insH | Complementary | 1980355 | 1981371 |
| | strand | | |
| yecG | | 1981890 | 1982318 |
| otsA | Complementary | 1982325 | 1983749 |
| | strand | | |
| otsB | Complementary | 1983724 | 1984524 |
| | strand | | |
| araH | Complementary | 1984691 | 1985680 |
| | strand | | |
| araG | Complementary | 1985692 | 1987206 |
| | strand | | |
| araF | Complementary | 1987276 | 1988265 |
| | strand | | |
| yecI | | 1989062 | 1989565 |
| yecJ | Complementary | 1989644 | 1989895 |
| | strand | | |
| isrB | Complementary | 1989976 | 1990135 |
| | strand | | |
| yecR | | 1990359 | 1990682 |
| ftn | | 1990853 | 1991350 |
| yecH | Complementary | 1991388 | 1991627 |
| | strand | | |
| tyrP | | 1991818 | 1993029 |
| yecA | Complementary | 1993091 | 1993756 |
| | strand | | |
| leuZ | Complementary | 1993952 | 1994038 |
| | strand | | |
| cysT | Complementary | 1994051 | 1994124 |
| | strand | | |
| glyW | Complementary | 1994179 | 1994254 |
| | strand | | |
| pgsA | Complementary | 1994406 | 1994954 |
| | strand | | |
| uvrC | Complementary | 1995011 | 1996843 |
| | strand | | |
| uvrY | Complementary | 1996840 | 1997496 |
| | strand | | |
| yecF | | 1997955 | 1998179 |
| sdlA | Complementary | 1998247 | 1998969 |
| | strand | | |
| yecC | Complementary | 1999199 | 1999951 |
| | strand | | |
| yecS | Complementary | 1999948 | 2000616 |
| | strand | | |
| yedO | Complementary | 2000631 | 2001617 |
| | strand | | |
| fliY | Complementary | 2001722 | 2002522 |
| | strand | | |
| fliZ | Complementary | 2002610 | 2003161 |
| | strand | | |
| fliA | Complementary | 2003207 | 2003926 |
| | strand | | |
| fliC | Complementary | 2004247 | 2005743 |
| | strand | | |
| fliD | | 2006009 | 2007415 |
| fliS | | 2007440 | 2007850 |
| fliT | | 2007850 | 2008215 |
| amyA | | 2008293 | 2009780 |
| yedD | Complementary | 2009814 | 2010227 |
| | strand | | |
| yedE | | 2010414 | 2011619 |
| yedF | | 2011616 | 2011849 |
| yedK | | 2011958 | 2012626 |
| yedL | | 2012737 | 2013216 |
| yedN_2 | Complementary | 2013485 | 2013676 |
| | strand | | |
| yedN_1 | Complementary | 2013686 | 2014006 |
| | strand | | |
| yedM | Complementary | 2014138 | 2014488 |
| | strand | | |
| intG | | 2014639 | 2014917 |
| fliE | Complementary | 2014837 | 2015151 |
| | strand | | |
| fliF | | 2015366 | 2017024 |
| fliG | | 2017017 | 2018012 |
| fliH | | 2018005 | 2018691 |
| fliI | | 2018691 | 2020064 |
| fliJ | | 2020083 | 2020526 |
| flik | | 2020523 | 2021650 |
| fliL | | 2021755 | 2022219 |
| fliM | | 2022224 | 2023228 |
| fliN | | 2023225 | 2023638 |
| fliO | | 2023641 | 2024006 |
| fliP | | 2024006 | 2024743 |
| fliQ | | 2024753 | 2025022 |
| fliR | | 2025030 | 2025815 |
| rcsA | | 2026105 | 2026728 |
| dsrB | Complementary | 2026772 | 2026960 |
| | strand | | |
| yodD | | 2027123 | 2027350 |
| dsrA | Complementary | 2027364 | 2027450 |
| | strand | | |
| yedP | | 2027648 | 2028463 |
| yedQ | Complementary | 2028460 | 2030154 |
| | strand | | |
| yodC | Complementary | 2030325 | 2030507 |
| | strand | | |
| yedI | Complementary | 2030586 | 2031503 |
| | strand | | |
| yedA | | 2031676 | 2032596 |
| vsr | Complementary | 2032585 | 2033055 |
| | strand | | |
| dcm | Complementary | 2033036 | 2034454 |
| | strand | | |
| yedJ | Complementary | 2034521 | 2035216 |
| | strand | | |
| yedR | Complementary | 2035256 | 2035621 |
| | strand | | |
| yedS_1 | | 2036188 | 2036673 |
| yedS_2 | | 2036683 | 2036892 |
| yedS_3 | | 2036976 | 2037380 |
| hchA | | 2037972 | 2038823 |
| yedV | Complementary | 2038931 | 2040289 |
| | strand | | |
| yedW | Complementary | 2040289 | 2040960 |
| | strand | | |
| yedX | | 2041093 | 2041506 |
| yedY | | 2041615 | 2042619 |
| yedZ | | 2042620 | 2043255 |
| yodA | | 2043512 | 2044162 |
| yodB | | 2044505 | 2045035 |
| serU | Complementary | 2045605 | 2045694 |
| | strand | | |
| yeeI | | 2045788 | 2046585 |
| asnT | | 2046686 | 2046761 |
| yeeJ | | 2047048 | 2054151 |
| yeeL_2 | Complementary | 2054413 | 2054739 |
| | strand | | |
| yeeL_1 | Complementary | 2054761 | 2055465 |
| | strand | | |
| shiA | | 2055780 | 2057096 |
| amn | | 2057198 | 2058652 |
| yeeN | | 2058995 | 2059711 |
| asnW | Complementary | 2060164 | 2060239 |
| | strand | | |
| yeeO | Complementary | 2060340 | 2061983 |
| | strand | | |
| asnU | | 2061988 | 2062063 |
| cbl | Complementary | 2062101 | 2063051 |
| | strand | | |
| nac | Complementary | 2063153 | 2064070 |
| | strand | | |
| asnV | | 2064397 | 2064472 |
| erfK | Complementary | 2064528 | 2065460 |
| | strand | | |
| cobT | Complementary | 2065525 | 2066604 |
| | strand | | |
| cobS | Complementary | 2066616 | 2067359 |
| | strand | | |
| cobU | Complementary | 2067356 | 2067901 |
| | strand | | |
| insH-6 | Complementary | 2068442 | 2069458 |
| | strand | | |
| yoeA | | 2070772 | 2071164 |
| insD-3 | Complementary | 2071089 | 2071994 |
| | strand | | |
| insC-3 | Complementary | 2071952 | 2072362 |
| | strand | | |
| yoeE | | 2072381 | 2072641 |
| yeeP | | 2072923 | 2073348 |
| isrC | | 2073452 | 2073655 |
| flu | | 2073676 | 2076795 |
| yeeR | | 2076916 | 2078448 |
| yeeS | | 2078445 | 2078891 |
| yeeT | | 2078954 | 2079175 |
| yeeU | | 2079249 | 2079617 |
| yeeV | | 2079706 | 2080080 |
| yeeW | | 2080077 | 2080271 |
| yoeF | | 2080712 | 2081068 |
| yeeX | Complementary | 2081169 | 2081564 |
| | strand | | |
| yeeA | Complementary | 2081670 | 2082728 |
| | strand | | |
| sbmC | Complementary | 2082926 | 2083399 |
| | strand | | |
| dacD | Complementary | 2083518 | 2084684 |
| | strand | | |
| sbcB | | 2084893 | 2086320 |
| yeeD | Complementary | 2086363 | 2086590 |
| | strand | | |
| yeeE | Complementary | 2086604 | 2087662 |
| | strand | | |
| yeeF | Complementary | 2087841 | 2089199 |
| | strand | | |
| yeeY | Complementary | 2089466 | 2090395 |
| | strand | | |
| yeeZ | Complementary | 2090441 | 2091265 |
| | strand | | |
| yoeB | Complementary | 2091348 | 2091602 |
| | strand | | |
| yefM | Complementary | 2091599 | 2091850 |
| | strand | | |
| hisL | | 2092133 | 2092183 |
| hisG | | 2092329 | 2093228 |
| hisD | | 2093234 | 2094538 |
| hisC | | 2094535 | 2095605 |
| hisB | | 2095605 | 2096672 |
| hisH | | 2096672 | 2097262 |
| hisA | | 2097262 | 2097999 |
| hisF | | 2097981 | 2098757 |
| hisI | | 2098751 | 2099362 |
| cld | Complementary | 2099458 | 2100438 |
| | strand | | |
| ugd | Complementary | 2100584 | 2101750 |
| | strand | | |
| gnd | Complementary | 2101999 | 2103405 |
| | strand | | |
| wbbL_2 | Complementary | 2103533 | 2103814 |
| | strand | | |
| insH-7 | Complementary | 2104032 | 2105048 |
| | strand | | |
| wbbL_1 | Complementary | 2105053 | 2105526 |
| | strand | | |
| wbbK | Complementary | 2105528 | 2106646 |
| | strand | | |
| wbbJ | Complementary | 2106631 | 2107221 |
| | strand | | |
| wbbI | Complementary | 2107202 | 2108194 |
| | strand | | |
| wbbH | Complementary | 2108197 | 2109363 |
| | strand | | |
| glf | Complementary | 2109363 | 2110466 |
| | strand | | |
| rfbX | Complementary | 2110474 | 2111721 |
| | strand | | |
| rfbC | Complementary | 2111718 | 2112275 |
| | strand | | |
| rfbA | Complementary | 2112275 | 2113156 |
| | strand | | |
| rfbD | Complementary | 2113214 | 2114113 |
| | strand | | |
| rfbB | Complementary | 2114113 | 2115198 |
| | strand | | |
| galF | Complementary | 2115571 | 2116464 |
| | strand | | |
| wcaM | Complementary | 2116639 | 2118033 |
| | strand | | |
| wcaL | Complementary | 2118044 | 2119264 |
| | strand | | |
| wcaK | Complementary | 2119261 | 2120541 |
| | strand | | |
| wzxC | Complementary | 2120817 | 2122295 |
| | strand | | |
| wcaJ | Complementary | 2122297 | 2123691 |
| | strand | | |
| cpsG | Complementary | 2123746 | 2125116 |
| | strand | | |
| cpsB | Complementary | 2125221 | 2126657 |
| | strand | | |
| wcaI | Complementary | 2126660 | 2127883 |
| | strand | | |
| nudD | Complementary | 2127880 | 2128359 |
| | strand | | |
| fcl | Complementary | 2128362 | 2129327 |
| | strand | | |
| gmd | Complementary | 2129330 | 2130451 |
| | strand | | |
| wcaF | Complementary | 2130477 | 2131025 |
| | strand | | |
| wcaE | Complementary | 2131041 | 2131787 |
| | strand | | |
| wcaD | Complementary | 2131798 | 2133015 |
| | strand | | |
| wcaC | Complementary | 2132990 | 2134207 |
| | strand | | |
| wcaB | Complementary | 2134204 | 2134692 |
| | strand | | |
| wcaA | Complementary | 2134695 | 2135534 |
| | strand | | |
| wzc | Complementary | 2135627 | 2137789 |
| | strand | | |
| wzb | Complementary | 2137792 | 2138235 |
| | strand | | |
| wza | Complementary | 2138241 | 2139380 |
| | strand | | |
| yegH | | 2140039 | 2141622 |
| asmA | Complementary | 2141896 | 2143749 |
| | strand | | |
| dcd | Complementary | 2143771 | 2144352 |
| | strand | | |
| udk | Complementary | 2144444 | 2145085 |
| | strand | | |
| yegE | | 2145403 | 2148720 |
| alkA | Complementary | 2148829 | 2149677 |
| | strand | | |
| yegD | | 2149811 | 2151163 |
| yegI | Complementary | 2151176 | 2153122 |
| | strand | | |
| yegJ | | 2153322 | 2153783 |
| yegK | Complementary | 2153848 | 2154609 |
| | strand | | |
| yegL | Complementary | 2154606 | 2155265 |
| | strand | | |
| ryeC | | 2155412 | 2155560 |
| ryeD | | 2155747 | 2155889 |
| mdtA | | 2156153 | 2157400 |
| mdtB | | 2157400 | 2160522 |
| mdtC | | 2160523 | 2163600 |
| mdtD | | 2163601 | 2165016 |
| baeS | | 2165013 | 2166416 |
| baeR | | 2166413 | 2167135 |
| yegP | | 2167326 | 2167658 |
| yegQ | | 2167805 | 2169166 |
| ryeE | | 2169249 | 2169334 |
| ogrK | Complementary | 2169439 | 2169657 |
| | strand | | |
| yegZ | Complementary | 2169739 | 2169957 |
| | strand | | |
| yegR | Complementary | 2170126 | 2170443 |
| | strand | | |
| yegS | | 2170849 | 2171748 |
| gatR_1 | Complementary | 2171830 | 2172276 |
| | strand | | |
| insE-5 | | 2172364 | 2172672 |
| insF-5 | | 2172669 | 2173535 |
| gatR_2 | Complementary | 2173532 | 2173870 |
| | strand | | |
| gatD | Complementary | 2173970 | 2175010 |
| | strand | | |
| gatC | Complementary | 2175058 | 2176413 |
| | strand | | |
| gatB | Complementary | 2176417 | 2176791 |
| | strand | | |
| gatA | Complementary | 2176732 | 2178383 |
| | strand | | |
| insH | | 2177051 | 2178031 |
| gatZ | Complementary | 2178393 | 2179655 |
| | strand | | |
| gatY | Complementary | 2179684 | 2180538 |
| | strand | | |
| fbaB | Complementary | 2180846 | 2181898 |
| | strand | | |
| yegT | | 2182155 | 2183432 |
| yegU | | 2183429 | 2184433 |
| yegV | | 2184430 | 2185395 |
| yegW | Complementary | 2185369 | 2186115 |
| | strand | | |
| yegX | Complementary | 2186167 | 2186985 |
| | strand | | |
| thiD | Complementary | 2187050 | 2187850 |
| | strand | | |
| thiM | Complementary | 2187847 | 2188635 |
| | strand | | |
| yohL | Complementary | 2188858 | 2189130 |
| | strand | | |
| yohM | | 2189251 | 2190075 |
| yohN | | 2190294 | 2190632 |
| yehA | Complementary | 2190714 | 2191748 |
| | strand | | |
| yehB | Complementary | 2191764 | 2194244 |
| | strand | | |
| yehC | Complementary | 2194260 | 2194979 |
| | strand | | |
| yehD | Complementary | 2195014 | 2195556 |
| | strand | | |
| yehE | Complementary | 2195849 | 2196130 |
| | strand | | |
| mrp | Complementary | 2196393 | 2197502 |
| | strand | | |
| metG | | 2197634 | 2199667 |
| molR_1 | | 2199808 | 2200632 |
| molR_2 | | 2200744 | 2202681 |
| molR_3 | | 2202656 | 2203603 |
| yehI | | 2203613 | 2207245 |
| yehK | | 2207306 | 2207623 |
| yehL | | 2207930 | 2209018 |
| yehM | | 2209029 | 2211308 |
| yehP | | 2211301 | 2212437 |
| yehQ | | 2212434 | 2214278 |
| yehR | | 2214559 | 2215020 |
| yehS | Complementary | 2215060 | 2215530 |
| | strand | | |
| yehT | Complementary | 2215577 | 2216296 |
| | strand | | |
| yehU | Complementary | 2216293 | 2217978 |
| | strand | | |
| mirA | | 2218200 | 2218931 |
| yohO | | 2218991 | 2219098 |
| yehW | Complementary | 2219079 | 2219810 |
| | strand | | |
| yehX | Complementary | 2219815 | 2220741 |
| | strand | | |
| yehY | Complementary | 2220734 | 2221891 |
| | strand | | |
| yehZ | Complementary | 2221898 | 2222815 |
| | strand | | |
| bglX | Complementary | 2223026 | 2225323 |
| | strand | | |
| dld | | 2225519 | 2227234 |
| pbpG | Complementary | 2227272 | 2228204 |
| | strand | | |
| yohC | Complementary | 2228378 | 2228965 |
| | strand | | |
| yohD | | 2229135 | 2229713 |
| yohF | Complementary | 2229843 | 2230604 |
| | strand | | |
| yohG | Complementary | 2230657 | 2231745 |
| | strand | | |
| yohH | Complementary | 2231883 | 2232020 |
| | strand | | |
| dusC | Complementary | 2232772 | 2233719 |
| | strand | | |
| yohJ | | 2233958 | 2234356 |
| yohK | | 2234353 | 2235048 |
| cdd | | 2235178 | 2236062 |
| sanA | | 2236212 | 2236931 |
| yeiS | | 2236934 | 2237173 |
| yeiT | | 2237367 | 2238605 |
| yeiA | | 2238599 | 2239834 |
| mglC | Complementary | 2240077 | 2241087 |
| | strand | | |
| mglA | Complementary | 2241103 | 2242623 |
| | strand | | |
| mglB | Complementary | 2242684 | 2243682 |
| | strand | | |
| galS | Complementary | 2243962 | 2245002 |
| | strand | | |
| yeiB | Complementary | 2245144 | 2246301 |
| | strand | | |
| folE | Complementary | 2246318 | 2246986 |
| | strand | | |
| yeiG | | 2247244 | 2248080 |
| cirA | Complementary | 2248112 | 2250103 |
| | strand | | |
| lysP | Complementary | 2250397 | 2251866 |
| | strand | | |
| yeiE | Complementary | 2252071 | 2252952 |
| | strand | | |
| yeiH | | 2253051 | 2254100 |
| nfo | | 2254174 | 2255031 |
| yeil | | 2255034 | 2256122 |
| yeiJ | Complementary | 2256229 | 2257479 |
| | strand | | |
| rihB | Complementary | 2257579 | 2258520 |
| | strand | | |
| yeiL | | 2258689 | 2259348 |
| yeiM | Complementary | 2259419 | 2260669 |
| | strand | | |
| yeiN | Complementary | 2260763 | 2261701 |
| | strand | | |
| yeiC | Complementary | 2261689 | 2262630 |
| | strand | | |
| fruA | Complementary | 2263053 | 2264744 |
| | strand | | |
| fruK | Complementary | 2264761 | 2265699 |
| | strand | | |
| fruB | Complementary | 2265699 | 2266829 |
| | strand | | |
| setB | | 2267197 | 2268378 |
| yeiW | Complementary | 2268375 | 2268629 |
| | strand | | |
| yeiP | | 2268784 | 2269356 |
| yeiQ | | 2269579 | 2271045 |
| yeiR | | 2271163 | 2272149 |
| yeiU | | 2272188 | 2272901 |
| spr | | 2273313 | 2273879 |
| rtn | | 2274060 | 2275616 |
| yejA | | 2275698 | 2277512 |
| yejB | | 2277513 | 2278607 |
| yejE | | 2278607 | 2279632 |
| yejF | | 2279634 | 2281223 |
| yejG | Complementary | 2281227 | 2281571 |
| | strand | | |
| bcr | Complementary | 2281904 | 2283094 |
| | strand | | |
| rsuA | Complementary | 2283122 | 2283817 |
| | strand | | |
| yejH | | 2283966 | 2285726 |
| rpiY | | 2285851 | 2286135 |
| yejK | Complementary | 2286274 | 2287281 |
| | strand | | |
| yejL | | 2287463 | 2287690 |
| yejM | | 2287710 | 2289470 |
| proL | | 2289545 | 2289621 |
| yejO | Complementary | 2289724 | 2292234 |
| | strand | | |
| insH-8 | Complementary | 2292399 | 2293415 |
| | strand | | |
| narP | | 2293834 | 2294481 |
| ccmH | Complementary | 2294692 | 2295744 |
| | strand | | |
| ccmG | Complementary | 2295741 | 2296298 |
| | strand | | |
| ccmF | Complementary | 2296295 | 2298238 |
| | strand | | |
| ccmE | Complementary | 2298235 | 2298714 |
| | strand | | |
| ccmD | Complementary | 2298711 | 2298920 |
| | strand | | |
| ccmC | Complementary | 2298917 | 2299654 |
| | strand | | |
| ccmB | Complementary | 2299696 | 2300358 |
| | strand | | |
| ccmA | Complementary | 2300355 | 2300978 |
| | strand | | |
| napC | Complementary | 2300991 | 2301593 |
| | strand | | |
| napB | Complementary | 2301603 | 2302052 |
| | strand | | |
| napH | Complementary | 2302049 | 2302912 |
| | strand | | |
| napG | Complementary | 2302899 | 2303594 |
| | strand | | |
| napA | Complementary | 2303601 | 2306087 |
| | strand | | |
| napD | Complementary | 2306084 | 2306347 |
| | strand | | |
| napF | Complementary | 2306337 | 2306831 |
| | strand | | |
| eco | | 2307239 | 2307727 |
| mqo | Complementary | 2308442 | 2310088 |
| | strand | | |
| yojI | Complementary | 2310306 | 2311949 |
| | strand | | |
| alkB | Complementary | 2312025 | 2312675 |
| | strand | | |
| ada | Complementary | 2312675 | 2313739 |
| | strand | | |
| yojL | Complementary | 2313813 | 2314868 |
| | strand | | |
| ompC | Complementary | 2314980 | 2316083 |
| | strand | | |
| micF | | 2316418 | 2316510 |
| rcsD | | 2316822 | 2319494 |
| rcsB | | 2319511 | 2320161 |
| rcsC | Complementary | 2320361 | 2324498 |
| | strand | | |
| insD | Complementary | 2320805 | 2321728 |
| | strand | | |
| insC | Complementary | 2321668 | 2322033 |
| | strand | | |
| atoS | | 2324713 | 2326539 |
| atoC | | 2326536 | 2327921 |
| atoD | | 2328117 | 2328779 |
| atoA | | 2328779 | 2329429 |
| atoE | | 2329426 | 2330748 |
| atoB | | 2330779 | 2331963 |
| yfaP | Complementary | 2332037 | 2332813 |
| | strand | | |
| yfaQ | Complementary | 2332818 | 2334467 |
| | strand | | |
| yfaS_2 | Complementary | 2334468 | 2334953 |
| | strand | | |
| yfaS_1 | Complementary | 2334969 | 2339072 |
| | strand | | |
| yfaT | Complementary | 2339006 | 2339629 |
| | strand | | |
| yfaA | Complementary | 2339626 | 2341314 |
| | strand | | |
| gyrA | Complementary | 2341463 | 2344090 |
| | strand | | |
| ubiG | | 2344237 | 2344959 |
| yfaL | Complementary | 2345087 | 2348839 |
| | strand | | |
| nrdA | | 2349535 | 2351820 |
| nrdB | | 2352054 | 2353184 |
| yfaE | | 2353184 | 2353438 |
| inaA | Complementary | 2353492 | 2354142 |
| | strand | | |
| yfaH | | 2354357 | 2354563 |
| glpQ | Complementary | 2354605 | 2355681 |
| | strand | | |
| glpT | Complementary | 2355686 | 2357044 |
| | strand | | |
| glpA | | 2357317 | 2358945 |
| glpB | | 2358935 | 2360194 |
| glpC | | 2360191 | 2361381 |
| yfaD | | 2361574 | 2362473 |
| ypaA | | 2362486 | 2362671 |
| yfaU | Complementary | 2362712 | 2363515 |
| | strand | | |
| yfaV | Complementary | 2363533 | 2364822 |
| | strand | | |
| yfaW | Complementary | 2364879 | 2366096 |
| | strand | | |
| yfaX | Complementary | 2366099 | 2366881 |
| | strand | | |
| yfaY | Complementary | 2367101 | 2368303 |
| | strand | | |
| yfaZ | Complementary | 2368403 | 2368945 |
| | strand | | |
| yfaO | | 2369224 | 2369649 |
| als | Complementary | 2369688 | 2370290 |
| | strand | | |
| yfbE | | 2370580 | 2371737 |
| yfbF | | 2371741 | 2372709 |
| yfbG | | 2372709 | 2374691 |
| yfbH | | 2374688 | 2375578 |
| arnT | | 2375578 | 2377230 |
| yfbW | | 2377227 | 2377562 |
| yfbJ | | 2377562 | 2377948 |
| pmrD | Complementary | 2377942 | 2378208 |
| | strand | | |
| menE | Complementary | 2378318 | 2379673 |
| | strand | | |
| menC | Complementary | 2379670 | 2380632 |
| | strand | | |
| menB | Complementary | 2380632 | 2381489 |
| | strand | | |
| yfbB | Complementary | 2381504 | 2382262 |
| | strand | | |
| menD | Complementary | 2382259 | 2383929 |
| | strand | | |
| menF | Complementary | 2384018 | 2385313 |
| | strand | | |
| elaB | Complementary | 2385392 | 2385697 |
| | strand | | |
| elaA | Complementary | 2385752 | 2386213 |
| | strand | | |
| elaC | | 2386278 | 2387195 |
| elaD | | 2387383 | 2388594 |
| yfbK | Complementary | 2388665 | 2390392 |
| | strand | | |
| yfbL | | 2390530 | 2391501 |
| yfbM | | 2391604 | 2392107 |
| yfbN | Complementary | 2392380 | 2393096 |
| | strand | | |
| yfbO | | 2393251 | 2393727 |
| yfbP | | 2393783 | 2394634 |
| nuoN | Complementary | 2394718 | 2395995 |
| | strand | | |
| nuoM | Complementary | 2396182 | 2397711 |
| | strand | | |
| nuoL | Complementary | 2397875 | 2399716 |
| | strand | | |
| nuoK | Complementary | 2399713 | 2400015 |
| | strand | | |
| nuoJ | Complementary | 2400012 | 2400566 |
| | strand | | |
| nuoI | Complementary | 2400578 | 2401120 |
| | strand | | |
| nuoH | Complementary | 2401135 | 2402112 |
| | strand | | |
| nuoG | Complementary | 2402109 | 2404841 |
| | strand | | |
| nuoF | Complementary | 2404888 | 2406225 |
| | strand | | |
| nuoE | Complementary | 2406222 | 2406722 |
| | strand | | |
| nuoC | Complementary | 2406725 | 2408527 |
| | strand | | |
| nuoB | Complementary | 2408621 | 2409283 |
| | strand | | |
| nuoA | Complementary | 2409299 | 2409742 |
| | strand | | |
| irhA | Complementary | 2410373 | 2411311 |
| | strand | | |
| insB | Complementary | 2411473 | 2411976 |
| | strand | | |
| insA | Complementary | 2411895 | 2412170 |
| | strand | | |
| yfbQ | | 2413007 | 2414224 |
| yfbR | | 2414308 | 2414907 |
| yfbS | Complementary | 2414966 | 2416798 |
| | strand | | |
| yfbT | Complementary | 2416885 | 2417535 |
| | strand | | |
| yfbU | Complementary | 2417546 | 2418040 |
| | strand | | |
| yfbV | Complementary | 2418123 | 2418578 |
| | strand | | |
| ackA | | 2418916 | 2420118 |
| pta | | 2420193 | 2422337 |
| yfcC | | 2422527 | 2424047 |
| yfcD | Complementary | 2424080 | 2424622 |
| | strand | | |
| yfcE | Complementary | 2424680 | 2425234 |
| | strand | | |
| yfcF | Complementary | 2425287 | 2425931 |
| | strand | | |
| yfcG | | 2426067 | 2426714 |
| folX | | 2426771 | 2427133 |
| yfcH | | 2427154 | 2428047 |
| yfcI | Complementary | 2428095 | 2428985 |
| | strand | | |
| hisP | Complementary | 2429182 | 2429955 |
| | strand | | |
| hisM | Complementary | 2429963 | 2430679 |
| | strand | | |
| hisQ | Complementary | 2430676 | 2431362 |
| | strand | | |
| hisJ | Complementary | 2431452 | 2432234 |
| | strand | | |
| argT | Complementary | 2432455 | 2433237 |
| | strand | | |
| ubiX | Complementary | 2433503 | 2434072 |
| | strand | | |
| purF | Complementary | 2434167 | 2435684 |
| | strand | | |
| cvpA | Complementary | 2435721 | 2436209 |
| | strand | | |
| dedD | Complementary | 2436468 | 2437130 |
| | strand | | |
| folC | Complementary | 2437120 | 2438388 |
| | strand | | |
| accD | Complementary | 2438458 | 2439372 |
| | strand | | |
| dedA | Complementary | 2439528 | 2440187 |
| | strand | | |
| truA | Complementary | 2440270 | 2441082 |
| | strand | | |
| usg | Complementary | 2441082 | 2442095 |
| | strand | | |
| pdxB | Complementary | 2442161 | 2443297 |
| | strand | | |
| flk | | 2443396 | 2444391 |
| yfcJ | Complementary | 2444388 | 2445566 |
| | strand | | |
| fabB | Complementary | 2445831 | 2447051 |
| | strand | | |
| trmC | | 2447210 | 2449216 |
| yfcL | Complementary | 2449337 | 2449615 |
| | strand | | |
| yfcM | Complementary | 2449649 | 2450197 |
| | strand | | |
| yfcA | Complementary | 2450197 | 2451006 |
| | strand | | |
| mepA | Complementary | 2451006 | 2451830 |
| | strand | | |
| aroC | Complementary | 2451834 | 2452919 |
| | strand | | |
| prmB | Complementary | 2452954 | 2453886 |
| | strand | | |
| yfcN | | 2454052 | 2454603 |
| yfcO | Complementary | 2454674 | 2455495 |
| | strand | | |
| yfcP | Complementary | 2455497 | 2456036 |
| | strand | | |
| yfcQ | Complementary | 2456033 | 2456521 |
| | strand | | |
| yfcR | Complementary | 2456518 | 2457030 |
| | strand | | |
| yfcS | Complementary | 2457030 | 2457782 |
| | strand | | |
| yfcT | Complementary | 2457802 | 2458698 |
| | strand | | |
| yfcU | Complementary | 2458711 | 2460447 |
| | strand | | |
| yfcV | Complementary | 2460529 | 2461092 |
| | strand | | |
| sixA | Complementary | 2461773 | 2462258 |
| | strand | | |
| yfcX | Complementary | 2462461 | 2464605 |
| | strand | | |
| yfcY | Complementary | 2464605 | 2465915 |
| | strand | | |
| yfcZ | Complementary | 2466096 | 2466380 |
| | strand | | |
| fadL | | 2466746 | 2468092 |
| yfdF | | 2468458 | 2469516 |
| vacJ | Complementary | 2469698 | 2470453 |
| | strand | | |
| yfdC | | 2470747 | 2471679 |
| argW | | 2471755 | 2471829 |
| intS | | 2471991 | 2473148 |
| yfdG | | 2473301 | 2473663 |
| yfdH | | 2473660 | 2474580 |
| yfdI | | 2474577 | 2475908 |
| tfaS | | 2476249 | 2476551 |
| yfdK | Complementary | 2476523 | 2476963 |
| | strand | | |
| yfdL | Complementary | 2476990 | 2477508 |
| | strand | | |
| yfdM | Complementary | 2477558 | 2477833 |
| | strand | | |
| yfdN | Complementary | 2477833 | 2478327 |
| | strand | | |
| yfdO | Complementary | 2478324 | 2478692 |
| | strand | | |
| yfdP | | 2478966 | 2479412 |
| yfdQ | | 2479478 | 2480302 |
| yfdR | | 2480430 | 2480966 |
| yfdS | | 2480957 | 2481319 |
| yfdT | | 2481319 | 2481624 |
| ypdJ | | 2481540 | 2481680 |
| torI | | 2481756 | 2481956 |
| dsdC | Complementary | 2482140 | 2483075 |
| | strand | | |
| dsdX | | 2483293 | 2484630 |
| dsdA | | 2484648 | 2485976 |
| emrY | Complementary | 2486084 | 2487622 |
| | strand | | |
| emrK | Complementary | 2487622 | 2488785 |
| | strand | | |
| evgA | | 2489201 | 2489815 |
| evgS | | 2489820 | 2493413 |
| yfdE | Complementary | 2493469 | 2494614 |
| | strand | | |
| yfdV | Complementary | 2494688 | 2495632 |
| | strand | | |
| oxc | Complementary | 2495702 | 2497396 |
| | strand | | |
| frc | Complementary | 2497450 | 2498700 |
| | strand | | |
| yfdX | Complementary | 2499213 | 2499848 |
| | strand | | |
| ypdI | | 2500144 | 2500419 |
| yfdY | Complementary | 2500496 | 2500738 |
| | strand | | |
| ddg | | 2501091 | 2502011 |
| yfdZ | Complementary | 2502503 | 2503741 |
| | strand | | |
| ypdA | | 2504117 | 2505814 |
| ypdB | | 2505829 | 2506563 |
| ypdC | | 2506576 | 2507433 |
| ypdD | Complementary | 2507436 | 2509931 |
| | strand | | |
| ypdE | Complementary | 2509956 | 2510993 |
| | strand | | |
| ypdF | Complementary | 2510993 | 2512078 |
| | strand | | |
| ypdG | Complementary | 2512093 | 2513340 |
| | strand | | |
| ypdH | Complementary | 2513362 | 2513688 |
| | strand | | |
| glk | Complementary | 2513907 | 2514872 |
| | strand | | |
| yfeO | | 2515076 | 2516332 |
| ypeC | | 2516447 | 2516773 |
| mntH | Complementary | 2516914 | 2518152 |
| | strand | | |
| nupC | | 2518488 | 2519690 |
| insL-3 | | 2519777 | 2520889 |
| yfeA | Complementary | 2521089 | 2523278 |
| | strand | | |
| alaX | Complementary | 2523487 | 2523562 |
| | strand | | |
| alaW | Complementary | 2523602 | 2523677 |
| | strand | | |
| yfeC | | 2523913 | 2524257 |
| yfeD | | 2524259 | 2524651 |
| gltX | Complementary | 2524703 | 2526118 |
| | strand | | |
| valU | | 2526377 | 2526452 |
| valX | | 2526497 | 2526572 |
| valY | | 2526619 | 2526694 |
| lysV | | 2526699 | 2526774 |
| xapR | Complementary | 2527039 | 2527923 |
| | strand | | |
| xapB | Complementary | 2528175 | 2529431 |
| | strand | | |
| xapA | Complementary | 2529491 | 2530324 |
| | strand | | |
| yfeN | | 2530573 | 2531337 |
| yfeR | Complementary | 2531376 | 2532302 |
| | strand | | |
| yfeH | | 2532392 | 2533390 |
| ypeB | Complementary | 2533387 | 2533605 |
| | strand | | |
| llgA | Complementary | 2533607 | 2535622 |
| | strand | | |
| zipA | Complementary | 2535693 | 2536679 |
| | strand | | |
| cysZ | | 2536909 | 2537670 |
| cysK | | 2537855 | 2538826 |
| ptsH | | 2539210 | 2539467 |
| ptsI | | 2539512 | 2541239 |
| crr | | 2541280 | 2541789 |
| pdxK | Complementary | 2541832 | 2542683 |
| | strand | | |
| yfeK | | 2542788 | 2543162 |
| yfeS | | 2543195 | 2543929 |
| cysM | Complementary | 2544118 | 2545029 |
| | strand | | |
| cysA | Complementary | 2545163 | 2546260 |
| | strand | | |
| cysW | Complementary | 2546250 | 2547125 |
| | strand | | |
| cysU | Complementary | 2547125 | 2547958 |
| | strand | | |
| cysP | Complementary | 2547958 | 2548974 |
| | strand | | |
| ucpA | Complementary | 2549278 | 2550069 |
| | strand | | |
| yfeT | Complementary | 2550198 | 2551055 |
| | strand | | |
| yfeU | | 2551219 | 2552115 |
| murP | | 2552119 | 2553543 |
| yfeW | | 2553548 | 2554852 |
| yfeX | Complementary | 2555092 | 2555991 |
| | strand | | |
| yfeY | Complementary | 2556087 | 2556662 |
| | strand | | |
| yfeZ | Complementary | 2556723 | 2557172 |
| | strand | | |
| ypeA | Complementary | 2557159 | 2557584 |
| | strand | | |
| amiA | | 2557798 | 2558667 |
| hemF | | 2558671 | 2559570 |
| yfeG | Complementary | 2559576 | 2560628 |
| | strand | | |
| yffI | Complementary | 2560674 | 2561174 |
| | strand | | |
| eutL | Complementary | 2561187 | 2561846 |
| | strand | | |
| eutC | Complementary | 2561856 | 2562743 |
| | strand | | |
| eutB | Complementary | 2562764 | 2564125 |
| | strand | | |
| eutA | Complementary | 2564137 | 2565540 |
| | strand | | |
| eutH | Complementary | 2565537 | 2566763 |
| | strand | | |
| eutG | Complementary | 2566980 | 2568167 |
| | strand | | |
| eutJ | Complementary | 2568157 | 2568993 |
| | strand | | |
| eutE | Complementary | 2569004 | 2570407 |
| | strand | | |
| cchB | Complementary | 2570419 | 2570706 |
| | strand | | |
| cchA | Complementary | 2570813 | 2571106 |
| | strand | | |
| eutI | Complementary | 2571145 | 2572161 |
| | strand | | |
| eutT | Complementary | 2572158 | 2572961 |
| | strand | | |
| eutQ | Complementary | 2572958 | 2573659 |
| | strand | | |
| eutP | Complementary | 2573634 | 2574113 |
| | strand | | |
| ypfE | Complementary | 2574126 | 2574461 |
| | strand | | |
| maeB | Complementary | 2574754 | 2577033 |
| | strand | | |
| talA | | 2577322 | 2578272 |
| tktB | | 2578292 | 2580295 |
| ypfG | Complementary | 2580390 | 2581433 |
| | strand | | |
| yffH | Complementary | 2581559 | 2582134 |
| | strand | | |
| aegA | Complementary | 2582202 | 2584181 |
| | strand | | |
| narQ | | 2584387 | 2586087 |
| acrD | | 2586251 | 2589364 |
| yffB | | 2589903 | 2590259 |
| dapE | | 2590263 | 2591390 |
| ypfN | | 2591418 | 2591618 |
| ypfH | Complementary | 2591728 | 2592426 |
| | strand | | |
| ypfI | Complementary | 2592500 | 2594515 |
| | strand | | |
| ypfJ | Complementary | 2594530 | 2595393 |
| | strand | | |
| purC | Complementary | 2595561 | 2596274 |
| | strand | | |
| nlpB | Complementary | 2596487 | 2597521 |
| | strand | | |
| dapA | Complementary | 2597538 | 2598416 |
| | strand | | |
| gcvR | | 2598562 | 2599134 |
| bcp | | 2599134 | 2599604 |
| hyfA | | 2599857 | 2600474 |
| hyfB | | 2600474 | 2602492 |
| hyfC | | 2602503 | 2603450 |
| hyfD | | 2603467 | 2604906 |
| hyfE | | 2604918 | 2605568 |
| hyfF | | 2605573 | 2607153 |
| hyfG | | 2607143 | 2608810 |
| hyfH | | 2608820 | 2609365 |
| hyfI | | 2609362 | 2610120 |
| hyfJ | | 2610113 | 2610526 |
| hyfR | | 2610556 | 2612568 |
| focB | | 2612590 | 2613438 |
| yfgO | Complementary | 2613476 | 2614537 |
| | strand | | |
| yfgC | | 2614750 | 2616213 |
| yfgD | | 2616234 | 2616593 |
| hda | Complementary | 2616731 | 2617477 |
| | strand | | |
| uraA | Complementary | 2617527 | 2618816 |
| | strand | | |
| upp | Complementary | 2618902 | 2619528 |
| | strand | | |
| purM | | 2619853 | 2620890 |
| purN | | 2620890 | 2621528 |
| ppk | | 2621700 | 2623766 |
| ppx | | 2623771 | 2625312 |
| yfgF | Complementary | 2625351 | 2627594 |
| | strand | | |
| yfgG | | 2627946 | 2628137 |
| yfgH | | 2628448 | 2628966 |
| yfgI | | 2628982 | 2629521 |
| guaA | Complementary | 2629614 | 2631191 |
| | strand | | |
| guaB | Complementary | 2631260 | 2632726 |
| | strand | | |
| xseA | | 2632888 | 2634258 |
| yfgJ | Complementary | 2634255 | 2634470 |
| | strand | | |
| der | Complementary | 2634540 | 2636012 |
| | strand | | |
| yfgL | Complementary | 2636130 | 2637308 |
| | strand | | |
| yfgM | Complementary | 2637319 | 2637939 |
| | strand | | |
| hisS | Complementary | 2637957 | 2639231 |
| | strand | | |
| lspG | Complementary | 2639342 | 2640460 |
| | strand | | |
| yfgA | Complementary | 2640487 | 2641500 |
| | strand | | |
| yfgB | Complementary | 2641785 | 2642939 |
| | strand | | |
| ndk | Complementary | 2643089 | 2643520 |
| | strand | | |
| pbpC | Complementary | 2643669 | 2645981 |
| | strand | | |
| yfhM | Complementary | 2645982 | 2650943 |
| | strand | | |
| sseA | | 2651150 | 2651995 |
| ryfA | | 2652511 | 2652814 |
| sseB | Complementary | 2652813 | 2653589 |
| | strand | | |
| pepB | Complementary | 2653731 | 2655014 |
| | strand | | |
| yfhJ | Complementary | 2655192 | 2655392 |
| | strand | | |
| fdx | Complementary | 2655404 | 2655739 |
| | strand | | |
| hscA | Complementary | 2655741 | 2657591 |
| | strand | | |
| hscB | Complementary | 2657608 | 2658123 |
| | strand | | |
| iscA | Complementary | 2658219 | 2658542 |
| | strand | | |
| iscU | Complementary | 2658559 | 2658945 |
| | strand | | |
| iscS | Complementary | 2658973 | 2660187 |
| | strand | | |
| iscR | Complementary | 2660299 | 2660787 |
| | strand | | |
| yfhQ | Complementary | 2661239 | 2661979 |
| | strand | | |
| suhB | | 2662098 | 2662901 |
| yfhR | | 2663019 | 2663900 |
| csiE | | 2664091 | 2665371 |
| hcaT | Complementary | 2665363 | 2666502 |
| | strand | | |
| hcaR | Complementary | 2666662 | 2667552 |
| | strand | | |
| hcaE | | 2667688 | 2669049 |
| hcaF | | 2669046 | 2669564 |
| hcaC | | 2669564 | 2669884 |
| hcaB | | 2669881 | 2670693 |
| hcaD | | 2670703 | 2671905 |
| yphA | | 2671930 | 2672424 |
| yphB | Complementary | 2672472 | 2673344 |
| | strand | | |
| yphC | Complementary | 2673356 | 2674417 |
| | strand | | |
| yphD | Complementary | 2674483 | 2675481 |
| | strand | | |
| yphE | Complementary | 2675506 | 2677017 |
| | strand | | |
| yphF | Complementary | 2677040 | 2678023 |
| | strand | | |
| yphG | Complementary | 2678120 | 2681401 |
| | strand | | |
| yphH | | 2681519 | 2682712 |
| glyA | Complementary | 2682910 | 2684163 |
| | strand | | |
| hmp | | 2684491 | 2685681 |
| glnB | Complementary | 2685726 | 2686064 |
| | strand | | |
| yfhA | Complementary | 2686125 | 2687459 |
| | strand | | |
| yfhG | Complementary | 2687449 | 2688162 |
| | strand | | |
| yfhK | Complementary | 2688327 | 2689754 |
| | strand | | |
| sroF | Complementary | 2689848 | 2689996 |
| | strand | | |
| purL | Complementary | 2690312 | 2694199 |
| | strand | | |
| yfhD | | 2694595 | 2696013 |
| tadA | Complementary | 2696010 | 2696546 |
| | strand | | |
| yfhB | Complementary | 2696571 | 2697206 |
| | strand | | |
| yfhH | | 2697415 | 2698263 |
| yfhL | | 2698319 | 2698579 |
| acpS | Complementary | 2699274 | 2699654 |
| | strand | | |
| pdxJ | Complementary | 2699654 | 2700385 |
| | strand | | |
| recO | Complementary | 2700397 | 2701125 |
| | strand | | |
| era | Complementary | 2701137 | 2702042 |
| | strand | | |
| rnc | Complementary | 2702039 | 2702719 |
| | strand | | |
| lepB | Complementary | 2702991 | 2703965 |
| | strand | | |
| lepA | Complementary | 2703981 | 2705780 |
| | strand | | |
| rseC | Complementary | 2705978 | 2706457 |
| | strand | | |
| rseB | Complementary | 2706454 | 2707410 |
| | strand | | |
| rseA | Complementary | 2707410 | 2708060 |
| | strand | | |
| rpoE | Complementary | 2708093 | 2708668 |
| | strand | | |
| nadB | | 2709076 | 2710698 |
| yfiC | Complementary | 2710683 | 2711420 |
| | strand | | |
| srmB | | 2711552 | 2712886 |
| yfiE | Complementary | 2713095 | 2713976 |
| | strand | | |
| yfiK | | 2714079 | 2714666 |
| yfiD | Complementary | 2714722 | 2715105 |
| | strand | | |
| ung | | 2715410 | 2716099 |
| yfiF | Complementary | 2716147 | 2717184 |
| | strand | | |
| trxC | | 2717391 | 2717810 |
| yfiP | | 2717879 | 2718577 |
| yfiQ | | 2718609 | 2721269 |
| pssA | | 2721383 | 2722738 |
| yfiM | | 2722835 | 2723107 |
| kgtP | Complementary | 2723104 | 2724402 |
| | strand | | |
| rrfG | Complementary | 2724725 | 2724844 |
| | strand | | |
| rrlG | Complementary | 2724937 | 2727840 |
| | strand | | |
| gltW | Complementary | 2728025 | 2728100 |
| | strand | | |
| rrsG | Complementary | 2728272 | 2729813 |
| | strand | | |
| clpB | Complementary | 2730256 | 2732829 |
| | strand | | |
| yflH | Complementary | 2732959 | 2733690 |
| | strand | | |
| rluD | Complementary | 2733687 | 2734667 |
| | strand | | |
| yflO | | 2734802 | 2735539 |
| yfiA | | 2735810 | 2736151 |
| pheL | | 2736255 | 2736302 |
| pheA | | 2736401 | 2737561 |
| tyrA | Complementary | 2737604 | 2738725 |
| | strand | | |
| aroF | Complementary | 2738736 | 2739806 |
| | strand | | |
| yfiL | | 2740016 | 2740381 |
| yfiR | | 2740531 | 2741049 |
| yfiN | | 2741039 | 2742265 |
| yfiB | | 2742281 | 2742763 |
| rplS | Complementary | 2742839 | 2743186 |
| | strand | | |
| trmD | Complementary | 2743228 | 2743995 |
| | strand | | |
| rimM | Complementary | 2744026 | 2744574 |
| | strand | | |
| rpsP | Complementary | 2744593 | 2744841 |
| | strand | | |
| ffh | Complementary | 2745090 | 2746451 |
| | strand | | |
| ypjD | | 2746543 | 2747409 |
| yfjD | | 2747520 | 2748716 |
| grpE | Complementary | 2748771 | 2749364 |
| | strand | | |
| yfjB | | 2749487 | 2750365 |
| recN | | 2750451 | 2752112 |
| smpA | | 2752261 | 2752602 |
| yfjF | Complementary | 2752664 | 2752954 |
| | strand | | |
| yfjG | Complementary | 2752944 | 2753420 |
| | strand | | |
| smpB | | 2753552 | 2754034 |
| ssrA | | 2754249 | 2754611 |
| intA | | 2754815 | 2756056 |
| yfjH | Complementary | 2756300 | 2757256 |
| | strand | | |
| alpA | | 2757300 | 2757512 |
| yfjI | | 2757641 | 2759050 |
| yfjJ | | 2759203 | 2759829 |
| yfjK | Complementary | 2760007 | 2762196 |
| | strand | | |
| yfjL | Complementary | 2762193 | 2763809 |
| | strand | | |
| yfjM | Complementary | 2764169 | 2764432 |
| | strand | | |
| yfjN | | 2764574 | 2765647 |
| yfjO | | 2765640 | 2766011 |
| yfjP | | 2766366 | 2767229 |
| yfjQ | | 2767321 | 2768142 |
| yfjR | | 2768359 | 2769060 |
| ypjK | | 2769101 | 2769337 |
| yfjS | | 2769337 | 2769780 |
| yfjT | | 2769804 | 2770271 |
| yfjU | Complementary | 2770496 | 2770810 |
| | strand | | |
| ypjL | Complementary | 2770823 | 2771341 |
| | strand | | |
| yfjV | Complementary | 2771492 | 2771692 |
| | strand | | |
| ypjM | Complementary | 2771632 | 2771814 |
| | strand | | |
| yfjW | | 2771974 | 2773677 |
| yfjX | | 2774575 | 2775033 |
| yfjY | | 2775042 | 2775524 |
| ypjJ | | 2775533 | 2775733 |
| yfjZ | | 2775771 | 2776088 |
| ypjF | | 2776109 | 2776438 |
| ypjA | Complementary | 2776802 | 2781382 |
| | strand | | |
| pinH | Complementary | 2781721 | 2781864 |
| | strand | | |
| ypjB | Complementary | 2782294 | 2783085 |
| | strand | | |
| ypjC | Complementary | 2783185 | 2783667 |
| | strand | | |
| ileY | Complementary | 2784418 | 2784493 |
| | strand | | |
| ygaQ | | 2785053 | 2785385 |
| ygaR | | 2785404 | 2786090 |
| yqaC | | 2786298 | 2786894 |
| yqaD | | 2787033 | 2787305 |
| ygaT | | 2787641 | 2788618 |
| ygaF | | 2788638 | 2789906 |
| gabD | | 2789929 | 2791377 |
| gabT | | 2791391 | 2792671 |
| gabP | | 2792909 | 2794309 |
| csiR | | 2794330 | 2794992 |
| ygaU | Complementary | 2794993 | 2795442 |
| | strand | | |
| yqaE | Complementary | 2795526 | 2795684 |
| | strand | | |
| ygaV | | 2795867 | 2796166 |
| ygaP | | 2796176 | 2796700 |
| stpA | Complementary | 2796747 | 2797151 |
| | strand | | |
| ygaW | | 2797820 | 2798260 |
| ygaC | Complementary | 2798306 | 2798650 |
| | strand | | |
| ygaM | | 2798790 | 2799131 |
| nrdH | | 2799379 | 2799624 |
| nrdI | | 2799621 | 2800031 |
| nrdE | | 2800004 | 2802148 |
| nrdF | | 2802158 | 2803117 |
| proV | | 2803471 | 2804673 |
| proW | | 2804666 | 2805730 |
| proX | | 2805788 | 2806780 |
| ygaX | | 2806972 | 2807238 |
| ygaY | | 2807268 | 2808149 |
| ygaZ | | 2808273 | 2809010 |
| ygaH | | 2809000 | 2809335 |
| mprA | | 2809426 | 2809956 |
| emrA | | 2810083 | 2811255 |
| emrB | | 2811272 | 2812810 |
| luxS | Complementary | 2812874 | 2813389 |
| | strand | | |
| sraD | | 2813457 | 2813531 |
| gshA | Complementary | 2813539 | 2815095 |
| | strand | | |
| yqaA | Complementary | 2815168 | 2815596 |
| | strand | | |
| yqaB | Complementary | 2815593 | 2816159 |
| | strand | | |
| argQ | Complementary | 2816440 | 2816516 |
| | strand | | |
| argZ | Complementary | 2816715 | 2816791 |
| | strand | | |
| argY | Complementary | 2816854 | 2816930 |
| | strand | | |
| argV | Complementary | 2817129 | 2817205 |
| | strand | | |
| serV | Complementary | 2817209 | 2817301 |
| | strand | | |
| csrA | Complementary | 2817617 | 2817802 |
| | strand | | |
| alaS | Complementary | 2818037 | 2820667 |
| | strand | | |
| recX | Complementary | 2820795 | 2821295 |
| | strand | | |
| recA | Complementary | 2821364 | 2822425 |
| | strand | | |
| ygaD | Complementary | 2822505 | 2823002 |
| | strand | | |
| mltB | Complementary | 2823147 | 2824232 |
| | strand | | |
| srlA | | 2824488 | 2826051 |
| srlE | | 2825048 | 2826007 |
| srlB | | 2826018 | 2826389 |
| srlD | | 2826393 | 2827172 |
| gutM | | 2827277 | 2827636 |
| srlR | | 2827703 | 2828476 |
| gutQ | | 2828469 | 2829434 |
| norR | Complementary | 2829431 | 2830945 |
| | strand | | |
| norV | | 2831132 | 2832571 |
| norW | | 2832568 | 2833701 |
| hypF | Complementary | 2833829 | 2836081 |
| | strand | | |
| hydN | Complementary | 2836234 | 2836761 |
| | strand | | |
| ascG | Complementary | 2836910 | 2837923 |
| | strand | | |
| ascF | | 2838180 | 2839637 |
| ascB | | 2839646 | 2841070 |
| hycI | Complementary | 2841229 | 2841699 |
| | strand | | |
| hycH | Complementary | 2841692 | 2842102 |
| | strand | | |
| hycG | Complementary | 2842099 | 2842866 |
| | strand | | |
| hycF | Complementary | 2842866 | 2843408 |
| | strand | | |
| hycE | Complementary | 2843418 | 2845127 |
| | strand | | |
| hycD | Complementary | 2845145 | 2846068 |
| | strand | | |
| hycC | Complementary | 2846071 | 2847897 |
| | strand | | |
| hycB | Complementary | 2847894 | 2848505 |
| | strand | | |
| hycA | Complementary | 2848630 | 2849091 |
| | strand | | |
| hypA | | 2849303 | 2849653 |
| hypB | | 2849657 | 2850529 |
| hypC | | 2850520 | 2850792 |
| hypD | | 2850792 | 2851913 |
| hypE | | 2851952 | 2852920 |
| fhlA | | 2852994 | 2855072 |
| ygbA | Complementary | 2855109 | 2855462 |
| | strand | | |
| mutS | | 2855749 | 2858310 |
| pphB | | 2858416 | 2859072 |
| ygbI | Complementary | 2859123 | 2859920 |
| | strand | | |
| ygbJ | | 2860086 | 2860994 |
| ygbK | | 2860991 | 2862157 |
| ygbL | | 2862249 | 2862887 |
| YgbM | | 2862892 | 2863668 |
| ygbN | | 2863757 | 2865121 |
| rpoS | Complementary | 2865215 | 2866090 |
| | strand | | |
| nlpD | Complementary | 2866270 | 2867409 |
| | strand | | |
| pcm | Complementary | 2867549 | 2868175 |
| | strand | | |
| surE | Complementary | 2868169 | 2868930 |
| | strand | | |
| truD | Complementary | 2868911 | 2869960 |
| | strand | | |
| ispF | Complementary | 2869957 | 2870436 |
| | strand | | |
| ispD | Complementary | 2870436 | 2871146 |
| | strand | | |
| ftsB | Complementary | 2871165 | 2871476 |
| | strand | | |
| ygbE | Complementary | 2871670 | 2871993 |
| | strand | | |
| cysC | Complementary | 2872043 | 2872648 |
| | strand | | |
| cysN | Complementary | 2872648 | 2874075 |
| | strand | | |
| cysD | Complementary | 2874077 | 2874985 |
| | strand | | |
| lap | | 2875237 | 2876274 |
| ygbF | Complementary | 2877225 | 2877509 |
| | strand | | |
| ygbT | Complementary | 2877511 | 2878428 |
| | strand | | |
| ygcH | Complementary | 2878444 | 2879043 |
| | strand | | |
| ygcI | Complementary | 2879030 | 2879704 |
| | strand | | |
| ygcJ | Complementary | 2879707 | 2880798 |
| | strand | | |
| ygcK | Complementary | 2880811 | 2881293 |
| | strand | | |
| ygcL | Complementary | 2881286 | 2882794 |
| | strand | | |
| ygcB | Complementary | 2883209 | 2885875 |
| | strand | | |
| cysH | Complementary | 2886234 | 2886968 |
| | strand | | |
| cysI | Complementary | 2887043 | 2888755 |
| | strand | | |
| cysJ | Complementary | 2888755 | 2890554 |
| | strand | | |
| ygcM | | 2890870 | 2891235 |
| ygcN | | 2891313 | 2892584 |
| ygcO | | 2892575 | 2892835 |
| ygcP | | 2892852 | 2893427 |
| ygcQ | Complementary | 2893575 | 2894435 |
| | strand | | |
| ygcR | Complementary | 2894432 | 2895211 |
| | strand | | |
| ygcS | Complementary | 2895189 | 2896526 |
| | strand | | |
| ygcU | Complementary | 2896620 | 2898074 |
| | strand | | |
| ygcW | Complementary | 2898144 | 2898929 |
| | strand | | |
| yqcE | | 2899248 | 2900525 |
| ygcE | | 2900552 | 2902030 |
| ygcF | Complementary | 2903403 | 2904074 |
| | strand | | |
| ygcG | | 2904367 | 2905239 |
| eno | Complementary | 2905299 | 2906597 |
| | strand | | |
| pyrG | Complementary | 2906685 | 2908322 |
| | strand | | |
| mazG | Complementary | 2908550 | 2909341 |
| | strand | | |
| chpA | Complementary | 2909412 | 2909747 |
| | strand | | |
| chpR | Complementary | 2909747 | 2909995 |
| | strand | | |
| retA | Complementary | 2910073 | 2912307 |
| | strand | | |
| rumA | Complementary | 2912355 | 2913656 |
| | strand | | |
| barA | | 2913713 | 2916469 |
| gudD | Complementary | 2916701 | 2918041 |
| | strand | | |
| gudX | Complementary | 2918062 | 2919402 |
| | strand | | |
| gudP | Complementary | 2919404 | 2920756 |
| | strand | | |
| yqcA | Complementary | 2921191 | 2921640 |
| | strand | | |
| yqcB | Complementary | 2921658 | 2922440 |
| | strand | | |
| yqcC | Complementary | 2922440 | 2922769 |
| | strand | | |
| csrB | Complementary | 2922812 | 2923171 |
| | strand | | |
| syd | Complementary | 2923391 | 2923936 |
| | strand | | |
| yqcD | | 2924004 | 2924852 |
| ygdH | | 2924964 | 2926328 |
| sdaC | | 2926885 | 2928174 |
| sdaB | | 2928232 | 2929599 |
| exo | | 2929621 | 2930466 |
| fucO | Complementary | 2930521 | 2931672 |
| | strand | | |
| fucA | Complementary | 2931697 | 2932344 |
| | strand | | |
| fucP | | 2932891 | 2934207 |
| fucI | | 2934240 | 2936015 |
| fucK | | 2936094 | 2937542 |
| fucU | | 2937544 | 2937966 |
| fucR | | 2938024 | 2838755 |
| ygdE | Complementary | 2938799 | 2939899 |
| | strand | | |
| ygdD | Complementary | 2939892 | 2940287 |
| | strand | | |
| gcvA | Complementary | 2940306 | 2941223 |
| | strand | | |
| gcvB | | 2941352 | 2941556 |
| ygdI | Complementary | 2941574 | 2941801 |
| | strand | | |
| csdA | | 2941993 | 2943198 |
| ygdK | | 2943198 | 2943641 |
| ygdL | Complementary | 2943692 | 2944498 |
| | strand | | |
| mltA | Complementary | 2944737 | 2945834 |
| | strand | | |
| metZ | | 2946043 | 2946119 |
| metW | | 2946153 | 2946229 |
| metV | | 2946263 | 2946339 |
| amiC | Complementary | 2946413 | 2947666 |
| | strand | | |
| argA | | 2947898 | 2949229 |
| recD | Complementary | 2949291 | 2951117 |
| | strand | | |
| recB | Complementary | 2951117 | 2954659 |
| | strand | | |
| ptr | Complementary | 2954652 | 2957540 |
| | strand | | |
| recC | Complementary | 2957716 | 2961084 |
| | strand | | |
| ppdC | Complementary | 2961097 | 2961420 |
| | strand | | |
| ygdB | Complementary | 2961405 | 2961812 |
| | strand | | |
| ppdB | Complementary | 2961809 | 2962372 |
| | strand | | |
| ppdA | Complementary | 2962363 | 2962833 |
| | strand | | |
| thyA | Complementary | 2963017 | 2963811 |
| | strand | | |
| lgt | Complementary | 2963818 | 2964693 |
| | strand | | |
| ptsP | Complementary | 2964844 | 2967090 |
| | strand | | |
| nudH | Complementary | 2967103 | 2967633 |
| | strand | | |
| mutH | | 2968318 | 2969007 |
| ygdQ | | 2969076 | 2969789 |
| ygdR | | 2969927 | 2970145 |
| tas | | 2970253 | 2971293 |
| ygeD | Complementary | 2971325 | 2972518 |
| | strand | | |
| aas | Complementary | 2972511 | 2974670 |
| | strand | | |
| rygA | Complementary | 2974758 | 2974845 |
| | strand | | |
| rygB | Complementary | 2974966 | 2975041 |
| | strand | | |
| galR | | 2975255 | 2976286 |
| lysA | Complementary | 2976293 | 2977555 |
| | strand | | |
| lysR | | 2977677 | 2978612 |
| ygeA | Complementary | 2978599 | 2979291 |
| | strand | | |
| araE | Complementary | 2979420 | 2980838 |
| | strand | | |
| kduD | Complementary | 2981153 | 2981914 |
| | strand | | |
| kduI | Complementary | 2981944 | 2983780 |
| | strand | | |
| yqeF | Complementary | 2983067 | 2984248 |
| | strand | | |
| yqeG | | 2984503 | 2985732 |
| yqeH | | 2986192 | 2986824 |
| yqeI | | 2987158 | 2987967 |
| yqeJ | | 2987960 | 2988442 |
| yqeK | Complementary | 2988591 | 2989016 |
| | strand | | |
| ygeF | | 2989210 | 2989656 |
| ygeG | | 2989924 | 2990415 |
| ygeH | | 2990750 | 2992126 |
| ygeI | | 2992294 | 2992512 |
| pbl | | 2992697 | 2993071 |
| ygeK | Complementary | 2993116 | 2993559 |
| | strand | | |
| ygeL | Complementary | 2993593 | 2993748 |
| | strand | | |
| ygeM | Complementary | 2993970 | 2994401 |
| | strand | | |
| ygeN | Complementary | 2994404 | 2994676 |
| | strand | | |
| ygeO | Complementary | 2994618 | 2995043 |
| | strand | | |
| insD-4 | Complementary | 2995028 | 2995933 |
| | strand | | |
| insC-4 | Complementary | 2995891 | 2996301 |
| | strand | | |
| ygeP | Complementary | 2996345 | 2996644 |
| | strand | | |
| ygeQ | Complementary | 2996690 | 2997484 |
| | strand | | |
| glyU | Complementary | 2997640 | 2997713 |
| | strand | | |
| ygeR | Complementary | 2997792 | 2998547 |
| | strand | | |
| xdhA | | 2999001 | 3001259 |
| xdhB | | 3001270 | 3002148 |
| xdhC | | 3002145 | 3002624 |
| ygeV | Complementary | 3002664 | 3004442 |
| | strand | | |
| ygeW | | 3004918 | 3006108 |
| ygeX | | 3006166 | 3007362 |
| ygeY | | 3007420 | 3008631 |
| hyuA | | 3008684 | 3010069 |
| yqeA | | 3010117 | 3011049 |
| yqeB | Complementary | 3011270 | 3012895 |
| | strand | | |
| yqeC | Complementary | 3012943 | 3013713 |
| | strand | | |
| ygfJ | | 3013816 | 3014394 |
| ygfK | | 3014716 | 3017814 |
| ssnA | | 3017817 | 3019145 |
| ygfM | | 3019196 | 3019975 |
| xdhD | | 3019972 | 3022842 |
| ygfO | | 3023007 | 3024407 |
| guaD | | 3024422 | 3025741 |
| ygfQ | | 3025777 | 3027144 |
| ygfS | Complementary | 3027180 | 3027668 |
| | strand | | |
| ygfT | Complementary | 3027668 | 3029587 |
| | strand | | |
| ygfU | | 3030023 | 3031471 |
| idi | | 3031721 | 3032269 |
| lysS | Complementary | 3632313 | 3033830 |
| | strand | | |
| prfB | Complementary | 3033840 | 3034938 |
| | strand | | |
| recJ | Complementary | 3035029 | 3036762 |
| | strand | | |
| dsbC | Complementary | 3036768 | 3037478 |
| | strand | | |
| xerD | Complementary | 3037503 | 3038399 |
| | strand | | |
| fldB | | 3038511 | 3039032 |
| ygfX | Complementary | 3039072 | 3039479 |
| | strand | | |
| ygfY | Complementary | 3039460 | 3039726 |
| | strand | | |
| ygfZ | | 3039969 | 3040949 |
| yqfA | Complementary | 3041145 | 3041804 |
| | strand | | |
| yqfB | Complementary | 3041968 | 3042279 |
| | strand | | |
| bglA | | 3042318 | 3043757 |
| ygfF | Complementary | 3043814 | 3044557 |
| | strand | | |
| gcvP | Complementary | 3044824 | 3047697 |
| | strand | | |
| gcvH | Complementary | 3047816 | 3048205 |
| | strand | | |
| gcvT | Complementary | 3048229 | 3049323 |
| | strand | | |
| visC | Complementary | 3049771 | 3050973 |
| | strand | | |
| ubiH | Complementary | 3050996 | 3652174 |
| | strand | | |
| pepP | Complementary | 3052171 | 3053496 |
| | strand | | |
| ygfB | Complementary | 3053522 | 3054100 |
| | strand | | |
| zapA | | 3054268 | 3054597 |
| ssrS | | 3054639 | 3054821 |
| ygfA | | 3054897 | 3055445 |
| rygC | | 3065471 | 3055621 |
| serA | Complementary | 3055834 | 3057066 |
| | strand | | |
| rplA | Complementary | 3057322 | 3057981 |
| | strand | | |
| yqfE | Complementary | 3058037 | 3058267 |
| | strand | | |
| argP | | 3058409 | 3059302 |
| yliK | | 3059506 | 3061650 |
| argK | | 3061643 | 3062638 |
| ygfG | | 3062649 | 3063434 |
| ygfH | | 3063458 | 3064936 |
| ygfI | Complementary | 3064933 | 3065829 |
| | strand | | |
| yggE | Complementary | 3065996 | 3066736 |
| | strand | | |
| argO | Complementary | 3066829 | 3067464 |
| | strand | | |
| mscS | Complementary | 3067603 | 3068463 |
| | strand | | |
| fbaA | Complementary | 3068821 | 3069900 |
| | strand | | |
| pgk | Complementary | 3070115 | 3071278 |
| | strand | | |
| epd | Complementary | 3071328 | 3072347 |
| | strand | | |
| yggC | Complementary | 3072632 | 3070345 |
| | strand | | |
| yggD | Complementary | 3073342 | 3073851 |
| | strand | | |
| yggF | Complementary | 3073873 | 3074838 |
| | strand | | |
| yggP | Complementary | 3074835 | 3076112 |
| | strand | | |
| cmtA | Complementary | 3076127 | 3077515 |
| | strand | | |
| cmtB | Complementary | 3077543 | 3077986 |
| | strand | | |
| tktA | Complementary | 3078300 | 3080291 |
| | strand | | |
| yggG | | 3080569 | 3081327 |
| speB | Complementary | 3081533 | 3082453 |
| | strand | | |
| speA | Complementary | 3082591 | 3084567 |
| | strand | | |
| yqgB | Complementary | 3084576 | 3084722 |
| | strand | | |
| yqgC | | 3084843 | 3085058 |
| yqgD | Complementary | 3085055 | 3085306 |
| | strand | | |
| metK | | 3085362 | 3086516 |
| galP | | 3086940 | 3088334 |
| sprT | | 3088411 | 3088908 |
| endA | | 3089003 | 3089710 |
| yggJ | | 3089790 | 3090521 |
| gshB | | 3090534 | 3091484 |
| yqgE | | 3091593 | 3092156 |
| yqgF | | 3092156 | 3092572 |
| yggR | Complementary | 3092756 | 3093736 |
| | strand | | |
| yggS | | 3093754 | 3094458 |
| yggT | | 3094476 | 3095042 |
| yggU | | 3095039 | 3095329 |
| yggV | | 3095337 | 3095930 |
| yggW | | 3095923 | 3097059 |
| yggM | Complementary | 3097214 | 3098221 |
| | strand | | |
| ansB | Complementary | 3098338 | 3099384 |
| | strand | | |
| yggN | Complementary | 3099560 | 3100279 |
| | strand | | |
| yggL | Complementary | 3100463 | 3100789 |
| | strand | | |
| yggH | Complementary | 3100789 | 3101508 |
| | strand | | |
| mutY | | 3101689 | 3102721 |
| yggX | | 3102749 | 3103024 |
| mltC | | 3103089 | 3104168 |
| nupG | | 3104370 | 3105626 |
| speC | Complementary | 3105676 | 3107811 |
| | strand | | |
| yqgA | | 3108209 | 3108916 |
| pheV | | 3109022 | 3109097 |
| yghD | Complementary | 3109246 | 3109782 |
| | strand | | |
| yghE | Complementary | 3109784 | 3110644 |
| | strand | | |
| yghF | Complementary | 3110710 | 3111576 |
| | strand | | |
| yghG | Complementary | 3111723 | 3112133 |
| | strand | | |
| pppA | Complementary | 3112199 | 3113008 |
| | strand | | |
| yghJ | Complementary | 3113206 | 3117768 |
| | strand | | |
| yghK | Complementary | 3118253 | 3119935 |
| | strand | | |
| glcB | Complementary | 3120290 | 3122461 |
| | strand | | |
| glcG | Complementary | 3122483 | 3122887 |
| | strand | | |
| glcF | Complementary | 3122892 | 3124115 |
| | strand | | |
| glcE | Complementary | 3124126 | 3125178 |
| | strand | | |
| glcD | Complementary | 3125178 | 3126677 |
| | strand | | |
| glcC | | 3126928 | 3127692 |
| yghO | Complementary | 3127699 | 3128871 |
| | strand | | |
| insH-9 | | 3128834 | 3129850 |
| yghQ | Complementary | 3129997 | 3131064 |
| | strand | | |
| yghR | Complementary | 3131110 | 3131868 |
| | strand | | |
| yghS | Complementary | 3131900 | 3132613 |
| | strand | | |
| yghT | | 3132787 | 3133479 |
| pltB | Complementary | 3133528 | 3135027 |
| | strand | | |
| gss | Complementary | 3135319 | 3137178 |
| | strand | | |
| yghU | | 3137383 | 3138249 |
| hybG | Complementary | 3138372 | 3938620 |
| | strand | | |
| hybF | Complementary | 3138633 | 3138974 |
| | strand | | |
| hybE | Complementary | 3138967 | 3139455 |
| | strand | | |
| hybD | Complementary | 3139448 | 3139942 |
| | strand | | |
| hybC | Complementary | 3139942 | 3141645 |
| | strand | | |
| hybB | Complementary | 3141642 | 3142820 |
| | strand | | |
| hybA | Complementary | 3142810 | 3143796 |
| | strand | | |
| hybO | Complementary | 3143799 | 3144917 |
| | strand | | |
| yghW | Complementary | 3145106 | 3145393 |
| | strand | | |
| yghX | Complementary | 3145512 | 3145922 |
| | strand | | |
| yghY | Complementary | 3145922 | 3146275 |
| | strand | | |
| yghZ | | 3146553 | 3147593 |
| yqhA | Complementary | 3147633 | 3148127 |
| | strand | | |
| yghA | | 3148318 | 3149202 |
| exbD | Complementary | 3149474 | 3149899 |
| | strand | | |
| exbB | Complementary | 3149906 | 3150640 |
| | strand | | |
| metC | | 3150892 | 3152079 |
| yghB | | 3152219 | 3152878 |
| yqhC | Complementary | 3152918 | 3153874 |
| | strand | | |
| yqhD | | 3154011 | 3155174 |
| dkgA | | 3155279 | 3156106 |
| yqhG | | 3156306 | 3157232 |
| yqhH | | 3157283 | 3157540 |
| yglQ | Complementary | 3157583 | 3159802 |
| | strand | | |
| sufI | Complementary | 3159913 | 3161325 |
| | strand | | |
| plsC | Complementary | 3161400 | 3162137 |
| | strand | | |
| parC | Complementary | 3162371 | 3164629 |
| | strand | | |
| ygiS | Complementary | 3164767 | 3166374 |
| | strand | | |
| ygiT | Complementary | 3166507 | 3166902 |
| | strand | | |
| ygiU | Complementary | 3166904 | 3167200 |
| | strand | | |
| ygiV | Complementary | 3167405 | 3167887 |
| | strand | | |
| ygiW | Complementary | 3167940 | 3168332 |
| | strand | | |
| qseB | | 3168484 | 3169143 |
| qseC | | 3169140 | 3170489 |
| ygiZ | Complementary | 3170535 | 3170867 |
| | strand | | |
| mdaB | | 3171186 | 3171767 |
| ygiN | | 3171798 | 3172112 |
| parE | Complementary | 3172160 | 3174052 |
| | strand | | |
| yqiA | Complementary | 3174081 | 3174662 |
| | strand | | |
| cpdA | Complementary | 3174662 | 3175489 |
| | strand | | |
| yqiB | Complementary | 3175514 | 3175936 |
| | strand | | |
| nudF | Complementary | 3175937 | 3176566 |
| | strand | | |
| tolC | | 3176771 | 3178252 |
| ygiA | | 3178252 | 3178512 |
| ygiB | | 3178496 | 3179071 |
| ygiC | | 3179077 | 3180237 |
| zupT | Complementary | 3180275 | 3181090 |
| | strand | | |
| ygiE | | 3181206 | 3181979 |
| ribB | Complementary | 3182469 | 3183122 |
| | strand | | |
| yqiC | | 3183496 | 3183786 |
| ygiL | | 3184070 | 3184621 |
| insC-5 | | 3184798 | 3185208 |
| insD-5 | | 3185166 | 3186071 |
| yqiG | | 3186056 | 3188521 |
| yqiH | | 3188537 | 3189286 |
| yqiI | | 3189288 | 3190352 |
| glgS | Complementary | 3190395 | 3190595 |
| | strand | | |
| yqiJ | | 3190864 | 3191493 |
| yqiK | | 3191520 | 3193181 |
| rygD | Complementary | 3193407 | 3193556 |
| | strand | | |
| rfaE | Complementary | 3193976 | 3195409 |
| | strand | | |
| ginE | Complementary | 3195457 | 3198297 |
| | strand | | |
| ygiF | Complementary | 3198320 | 3199621 |
| | strand | | |
| htrG | | 3199863 | 3200483 |
| cca | | 3200547 | 3201785 |
| bacA | Complementary | 3201966 | 3202787 |
| | strand | | |
| folB | Complementary | 3202877 | 3203245 |
| | strand | | |
| ygiH | | 3203350 | 3203967 |
| ygiP | Complementary | 3203980 | 3204912 |
| | strand | | |
| ttdA | | 3205119 | 3206030 |
| ttdB | | 3206027 | 3206632 |
| ygjE | | 3206680 | 3208143 |
| ygjD | Complementary | 3208186 | 3209199 |
| | strand | | |
| rpsU | | 3209437 | 3209652 |
| dnaG | | 3209763 | 3211508 |
| rpoD | | 3211703 | 3213544 |
| ygjF | Complementary | 3213623 | 3214129 |
| | strand | | |
| ileX | | 3214254 | 3214329 |
| yqjH | Complementary | 3214383 | 3215147 |
| | strand | | |
| yqjI | | 3215435 | 3216058 |
| aer | Complementary | 3216212 | 3217732 |
| | strand | | |
| ygjG | | 3218123 | 3219529 |
| ygjH | Complementary | 3219571 | 3219903 |
| | strand | | |
| ebgR | | 3220122 | 3221105 |
| ebgA | | 3221289 | 3224381 |
| ebgC | | 3224378 | 3224827 |
| ygjI | | 3224890 | 3226323 |
| ygjJ | | 3226457 | 3227527 |
| ygjK | | 3227544 | 3229895 |
| fadH | | 3230321 | 3232339 |
| ygjM | Complementary | 3232384 | 3232800 |
| | strand | | |
| ygjN | Complementary | 3232797 | 3233111 |
| | strand | | |
| ygjO | Complementary | 3233395 | 3234531 |
| | strand | | |
| ygjP | | 3234616 | 3235119 |
| ygjQ | | 3235196 | 3235888 |
| ygjR | | 3235949 | 3236953 |
| sraF | | 3237030 | 3237217 |
| alx | | 3237236 | 3238201 |
| sstT | | 3238600 | 3239844 |
| ygjV | Complementary | 3239849 | 3240400 |
| | strand | | |
| uxaA | Complementary | 3240483 | 3241970 |
| | strand | | |
| uxaC | Complementary | 3241985 | 3243397 |
| | strand | | |
| exuT | | 3243760 | 3245178 |
| exuR | | 3245308 | 3246084 |
| yqjA | | 3246429 | 3247091 |
| yqjB | | 3247095 | 3247478 |
| yqjC | | 3247625 | 3247993 |
| yqjD | | 3248031 | 3248336 |
| yqjE | | 3248339 | 3248743 |
| yqjK | | 3248733 | 3249032 |
| yqjF | | 3249218 | 3249610 |
| yqjG | | 3249680 | 3250666 |
| yhaH | | 3250960 | 3251325 |
| yhaI | | 3251567 | 3251923 |
| yhaJ | Complementary | 3251974 | 3252870 |
| | strand | | |
| yhaK | | 3252975 | 3253676 |
| yhaL | | 3253699 | 3253863 |
| yhaM | Complementary | 3253997 | 3255307 |
| | strand | | |
| yhaO | Complementary | 3255335 | 3256603 |
| | strand | | |
| tdcG | Complementary | 3256941 | 3258305 |
| | strand | | |
| tdcF | Complementary | 3258377 | 3258766 |
| | strand | | |
| tdcE | Complementary | 3258780 | 3261074 |
| | strand | | |
| insH | | 3261202 | 3262182 |
| tdcD | Complementary | 3262220 | 3263515 |
| | strand | | |
| tdcC | Complementary | 3263541 | 3264872 |
| | strand | | |
| tdcB | Complementary | 3264894 | 3265883 |
| | strand | | |
| tdcA | Complementary | 3265982 | 3266920 |
| | strand | | |
| tdcR | | 3267235 | 3267453 |
| yhaB | | 3267709 | 3268248 |
| yhaC | | 3268270 | 3269457 |
| rnpB | Complementary | 3270071 | 3270447 |
| | strand | | |
| garK | Complementary | 3270480 | 3271706 |
| | strand | | |
| garR | Complementary | 3271722 | 3272612 |
| | strand | | |
| garL | Complementary | 3272642 | 3273412 |
| | strand | | |
| garP | Complementary | 3273428 | 3274762 |
| | strand | | |
| garD | | 3275137 | 3276708 |
| sohA | | 3276857 | 3277192 |
| yhaV | | 3277192 | 3277656 |
| agaR | Complementary | 3277711 | 3278520 |
| | strand | | |
| kbaZ | | 3278769 | 3280049 |
| agaV | | 3280072 | 3280545 |
| agaW | | 3280556 | 3280957 |
| agaA | | 3280977 | 3281480 |
| agaS | | 3281831 | 3282985 |
| kbaY | | 3282998 | 3283858 |
| agaB | | 3284025 | 3284501 |
| agaC | | 3284540 | 3285343 |
| agaD | | 3285333 | 3286124 |
| agaI | | 3286125 | 3286880 |
| yraH | | 3287281 | 3287865 |
| yraI | | 3287945 | 3288640 |
| yraJ | | 3288669 | 3291185 |
| yraK | | 3291196 | 3292287 |
| yraL | Complementary | 3292330 | 3293190 |
| | strand | | |
| yraM | | 3293255 | 3295291 |
| yraN | | 3295249 | 3295644 |
| yraO | | 3295664 | 3296254 |
| yraP | | 3296264 | 3296839 |
| yraQ | Complementary | 3296953 | 3297993 |
| | strand | | |
| yraR | Complementary | 3298066 | 3298701 |
| | strand | | |
| yhbO | | 3298829 | 3299347 |
| yhbP | Complementary | 3299327 | 3299770 |
| | strand | | |
| yhbQ | | 3299821 | 3300123 |
| yhbS | Complementary | 3300110 | 3300613 |
| | strand | | |
| yhbT | Complementary | 3300607 | 3301131 |
| | strand | | |
| yhbU | | 3301340 | 3302335 |
| yhbV | | 3302344 | 3303222 |
| yhbW | | 3303303 | 3304310 |
| mtr | Complementary | 3304428 | 3305672 |
| | strand | | |
| deaD | Complementary | 3305826 | 3307715 |
| | strand | | |
| nlpI | Complementary | 3307895 | 3308779 |
| | strand | | |
| pnp | Complementary | 3308888 | 3311092 |
| | strand | | |
| sraG | | 3311080 | 3311253 |
| rpsO | Complementary | 3311270 | 3311539 |
| | strand | | |
| truB | Complementary | 3311688 | 3312632 |
| | strand | | |
| rbfA | Complementary | 3312632 | 3313033 |
| | strand | | |
| infB | Complementary | 3313197 | 3315869 |
| | strand | | |
| nusA | Complementary | 3315894 | 3317381 |
| | strand | | |
| yhbC | Complementary | 3317409 | 3317861 |
| | strand | | |
| metY | Complementary | 3318068 | 3318144 |
| | strand | | |
| argG | | 3318492 | 3319835 |
| yhbX | Complementary | 3319843 | 3321468 |
| | strand | | |
| leuU | Complementary | 3321927 | 3322013 |
| | strand | | |
| secG | Complementary | 3322028 | 3322360 |
| | strand | | |
| glmM | Complementary | 3322588 | 3321925 |
| | strand | | |
| folP | Complementary | 3323918 | 3324766 |
| | strand | | |
| ftsH | Complementary | 3324856 | 3326790 |
| | strand | | |
| rrmJ | Complementary | 3326890 | 3327519 |
| | strand | | |
| yhbY | | 3327645 | 3327938 |
| greA | Complementary | 3328094 | 3328570 |
| | strand | | |
| dacB | | 3328818 | 3330251 |
| obgE | Complementary | 3330437 | 3331609 |
| | strand | | |
| yhbE | Complementary | 3331625 | 3332590 |
| | strand | | |
| rpmA | Complementary | 3332717 | 3332974 |
| | strand | | |
| rplU | Complementary | 3332995 | 3333306 |
| | strand | | |
| lspB | | 3333565 | 3334536 |
| sfsB | | 3334764 | 3335042 |
| murA | Complementary | 3335090 | 3336349 |
| | strand | | |
| yrbA | Complementary | 3336404 | 3336658 |
| | strand | | |
| yrbB | Complementary | 3336818 | 3337111 |
| | strand | | |
| yrbC | Complementary | 3337111 | 3337746 |
| | strand | | |
| yrbD | Complementary | 3337765 | 3338316 |
| | strand | | |
| yrbE | Complementary | 3338321 | 3339103 |
| | strand | | |
| yrbF | Complementary | 3339111 | 3339920 |
| | strand | | |
| yrbG | | 3340130 | 3341107 |
| kdsD | | 3341121 | 3342107 |
| kdsC | | 3342128 | 3342694 |
| yrbK | | 3342691 | 3343266 |
| yhbN | | 3343235 | 3343792 |
| yhbG | | 3343799 | 3344524 |
| rpoN | | 3344572 | 3346005 |
| yhbH | | 3346028 | 3346315 |
| ptsN | | 3346433 | 3346924 |
| yhbJ | | 3346970 | 3347824 |
| npr | | 3347821 | 3348093 |
| yrbL | | 3348307 | 3348939 |
| mtgA | Complementary | 3348936 | 3349664 |
| | strand | | |
| elbB | Complementary | 3349661 | 3350314 |
| | strand | | |
| ryhA | | 3350432 | 3350539 |
| arcB | Complementary | 3350544 | 3352880 |
| | strand | | |
| yhcC | Complementary | 3352976 | 3353905 |
| | strand | | |
| gltB | | 3354487 | 3359040 |
| gltD | | 3359053 | 3360471 |
| gltF | | 3361031 | 3361795 |
| yhcA | | 3361767 | 3362641 |
| yhoD | | 3362662 | 3365043 |
| yhcE_1 | | 3365040 | 3365519 |
| insH-10 | Complementary | 3365557 | 3366573 |
| | strand | | |
| yhcE_2 | | 3366536 | 3366784 |
| yhcF | | 3366781 | 3367497 |
| yhcG | | 3367682 | 3368809 |
| yhcH | Complementary | 3368869 | 3369333 |
| | strand | | |
| nanK | Complementary | 3369330 | 3370205 |
| | strand | | |
| nanE | Complementary | 3370202 | 3370891 |
| | strand | | |
| nanT | Complementary | 3370939 | 3372429 |
| | strand | | |
| nanA | Complementary | 3372538 | 3373431 |
| | strand | | |
| nanR | Complementary | 3373553 | 3374344 |
| | strand | | |
| dcuD | | 3374724 | 3376091 |
| sspB | Complementary | 3376134 | 3376631 |
| | strand | | |
| sspA | Complementary | 3376637 | 3377275 |
| | strand | | |
| rpsI | Complementary | 3377670 | 3378062 |
| | strand | | |
| rplM | Complementary | 3378078 | 3378506 |
| | strand | | |
| yhcM | Complementary | 3378725 | 3379852 |
| | strand | | |
| yhcB | | 3380046 | 3380444 |
| degQ | | 3380598 | 3381965 |
| degS | | 3382055 | 3383122 |
| mdh | Complementary | 3383185 | 3384123 |
| | strand | | |
| argR | | 3384558 | 3385028 |
| yhcN | | 3385393 | 3385656 |
| yhcO | Complementary | 3385712 | 3385984 |
| | strand | | |
| aaeB | Complementary | 3386076 | 3388043 |
| | strand | | |
| aaeA | Complementary | 3388049 | 3388981 |
| | strand | | |
| aaeX | Complementary | 3388989 | 3389192 |
| | strand | | |
| aaeR | | 3389375 | 3390304 |
| tldD | Complementary | 3390438 | 3391883 |
| | strand | | |
| yhdP | Complementary | 3392313 | 3396113 |
| | strand | | |
| rng | Complementary | 3396181 | 3397650 |
| | strand | | |
| yhdE | Complementary | 3397640 | 3398233 |
| | strand | | |
| mreD | Complementary | 3398242 | 3398730 |
| | strand | | |
| mreC | Complementary | 3398730 | 3399833 |
| | strand | | |
| mreB | Complementary | 3399899 | 3400942 |
| | strand | | |
| yhdA | Complementary | 3401247 | 3403187 |
| | strand | | |
| yhdH | | 3403339 | 3404313 |
| accB | | 3405291 | 3405761 |
| accC | | 3405772 | 3407121 |
| yhdT | | 3407230 | 3407472 |
| panF | | 3407462 | 3408913 |
| prmA | | 3408925 | 3409806 |
| dusB | | 3410135 | 3411100 |
| fis | | 3411126 | 3411422 |
| yhdJ | | 3411508 | 3412392 |
| yhdU | | 3412476 | 3412655 |
| envR | Complementary | 3412658 | 3413320 |
| | strand | | |
| acrE | | 3413719 | 3414876 |
| acrF | | 3414888 | 3417992 |
| yhdV | | 3418245 | 3418466 |
| yhdW | | 3419004 | 3419921 |
| yhdX | | 3419989 | 3421170 |
| yhdY | | 3421180 | 3422283 |
| yhdZ | | 3422291 | 3423049 |
| rrfF | Complementary | 3423278 | 3423397 |
| | strand | | |
| thrV | Complementary | 3423435 | 3423510 |
| | strand | | |
| rrfD | Complementary | 3423523 | 3423642 |
| | strand | | |
| rrlD | Complementary | 3423735 | 3426638 |
| | strand | | |
| gltV | Complementary | 3426832 | 3426907 |
| | strand | | |
| rrsD | Complementary | 3426993 | 3428534 |
| | strand | | |
| purH | | 3429149 | 3430738 |
| purD | | 3430750 | 3432039 |
| zraR | Complementary | 3432036 | 3433361 |
| | strand | | |
| zraS | Complementary | 3433358 | 3434755 |
| | strand | | |
| zraP | | 3434993 | 3435418 |
| yjaH | Complementary | 3435420 | 3436115 |
| | strand | | |
| hupA | Complementary | 3436128 | 3436400 |
| | strand | | |
| yjaG | Complementary | 3436587 | 3437177 |
| | strand | | |
| nfi | Complementary | 3437220 | 3437891 |
| | strand | | |
| hemE | Complementary | 3437901 | 3438965 |
| | strand | | |
| nudC | Complementary | 3439005 | 3439778 |
| | strand | | |
| rsd | | 3439873 | 3440349 |
| thiC | | 3440582 | 3442477 |
| thiE | | 3442477 | 3443112 |
| thiF | | 3443105 | 3443860 |
| thiS | | 3443844 | 3444044 |
| thiG | | 3444046 | 3444816 |
| thiH | | 3444813 | 3445946 |
| htrC | Complementary | 3446356 | 3446895 |
| | strand | | |
| rpoC | Complementary | 3447108 | 3451331 |
| | strand | | |
| rpoB | Complementary | 3451408 | 3455436 |
| | strand | | |
| rplL | Complementary | 3455756 | 3456121 |
| | strand | | |
| rplJ | Complementary | 3456188 | 3456685 |
| | strand | | |
| rplA | Complementary | 3457098 | 3457802 |
| | strand | | |
| rplK | Complementary | 3457806 | 3458234 |
| | strand | | |
| nusG | Complementary | 3458393 | 3458938 |
| | strand | | |
| secE | Complementary | 3458940 | 3459323 |
| | strand | | |
| tufB | Complementary | 3459553 | 3460737 |
| | strand | | |
| thrT | Complementary | 3460852 | 3460927 |
| | strand | | |
| glyT | Complementary | 3460934 | 3461008 |
| | strand | | |
| tyrU | Complementary | 3461125 | 3461209 |
| | strand | | |
| thrU | Complementary | 3461218 | 3461293 |
| | strand | | |
| coaA | | 3461655 | 3462605 |
| birA | Complementary | 3462634 | 3463599 |
| | strand | | |
| murB | Complementary | 3463596 | 3464624 |
| | strand | | |
| rrfB | Complementary | 3464925 | 3465044 |
| | strand | | |
| rrlB | Complementary | 3465137 | 3468040 |
| | strand | | |
| gltT | Complementary | 3468234 | 3468309 |
| | strand | | |
| rrsB | Complementary | 3468481 | 3470022 |
| | strand | | |
| murI | Complementary | 3470396 | 3471253 |
| | strand | | |
| btuB | Complementary | 3471198 | 3473042 |
| | strand | | |
| trmA | | 3473411 | 3474511 |
| yijD | Complementary | 3474551 | 3474910 |
| | strand | | |
| fabR | Complementary | 3474910 | 3475614 |
| | strand | | |
| sthA | | 3475891 | 3477291 |
| oxyR | Complementary | 3477274 | 3478191 |
| | strand | | |
| oxyS | | 3478287 | 3478396 |
| argH | Complementary | 3478458 | 3479831 |
| | strand | | |
| argB | Complementary | 3479892 | 3480665 |
| | strand | | |
| argC | Complementary | 3480676 | 3481680 |
| | strand | | |
| argE | | 3481834 | 3482985 |
| ppc | | 3483583 | 3486234 |
| yijP | | 3486416 | 3488149 |
| yijO | | 3488364 | 3489215 |
| frwD | Complementary | 3489202 | 3489543 |
| | strand | | |
| pflC | Complementary | 3489545 | 3490423 |
| | strand | | |
| pflD | Complementary | 3490389 | 3492686 |
| | strand | | |
| frwB | Complementary | 3492737 | 3493057 |
| | strand | | |
| ftwC | Complementary | 3493072 | 3494151 |
| | strand | | |
| ptsA | | 3494460 | 3496961 |
| fsaB | | 3496973 | 3497635 |
| gldA | | 3497646 | 3498749 |
| yijF | | 3499024 | 3499641 |
| yijE | Complementary | 3499668 | 3500573 |
| | strand | | |
| katG | Complementary | 3500666 | 3502846 |
| | strand | | |
| metF | Complementary | 3503175 | 3504065 |
| | strand | | |
| metL | Complementary | 3504414 | 3506846 |
| | strand | | |
| metB | Complementary | 3506849 | 3508009 |
| | strand | | |
| MetJ | | 3508286 | 3508603 |
| yliX | | 3508787 | 3509395 |
| rpmE | Complementary | 3509456 | 3509668 |
| | strand | | |
| priA | | 3509871 | 3512069 |
| cytR | | 3512225 | 3513250 |
| ftsN | | 3513342 | 3514301 |
| hslV | | 3514394 | 3514924 |
| htlU | | 3514934 | 3516265 |
| menA | | 3516332 | 3517258 |
| rraA | | 3517351 | 3517836 |
| yiiU | Complementary | 3517921 | 3518166 |
| | strand | | |
| glpF | | 3518591 | 3519436 |
| glpK | | 3519459 | 3520967 |
| glpX | | 3521102 | 3522112 |
| fpr | | 3522209 | 3522955 |
| yiiT | Complementary | 3522960 | 3523388 |
| | strand | | |
| yiiS | Complementary | 3523415 | 3523714 |
| | strand | | |
| yiiR | Complementary | 3523926 | 3524366 |
| | strand | | |
| yiiQ | | 3524467 | 3525066 |
| tpiA | | 3525174 | 3525941 |
| cdh | Complementary | 3525996 | 3526751 |
| | strand | | |
| sbp | Complementary | 3526858 | 3527847 |
| | strand | | |
| pfkA | Complementary | 3528167 | 3529129 |
| | strand | | |
| fieF | Complementary | 3529310 | 3530212 |
| | strand | | |
| cpxP | Complementary | 3530361 | 3530861 |
| | strand | | |
| cpxR | | 3531011 | 3531709 |
| cpxA | | 3531706 | 3533079 |
| yliM | Complementary | 3533185 | 3533859 |
| | strand | | |
| kdgT | Complementary | 3534008 | 3534991 |
| | strand | | |
| sodA | Complementary | 3535251 | 3535871 |
| | strand | | |
| rhaT | | 3536156 | 3537190 |
| rhaR | Complementary | 3537187 | 3538125 |
| | strand | | |
| rhaS | Complementary | 3538109 | 3538945 |
| | strand | | |
| rhaB | | 3539233 | 3540702 |
| rhaA | | 3540699 | 3541958 |
| rhaD | | 3542409 | 3543233 |
| yiiL | | 3543243 | 3543557 |
| frvA | | 3543858 | 3544304 |
| frvB | | 3544315 | 3545766 |
| frvX | | 3545756 | 3546826 |
| frvR | | 3546826 | 3548574 |
| yiiG | Complementary | 3548624 | 3549679 |
| | strand | | |
| fdhD | Complementary | 3549832 | 3550665 |
| | strand | | |
| fdoG | | 3550859 | 3553909 |
| fdoH | | 3553922 | 3554824 |
| fdoI | | 3554821 | 3555456 |
| fdhE | | 3555453 | 3556382 |
| yiiF | Complementary | 3556712 | 3556930 |
| | strand | | |
| yiiE | Complementary | 3557172 | 3557390 |
| | strand | | |
| yiiD | Complementary | 3558243 | 3559232 |
| | strand | | |
| dtd | Complementary | 3559229 | 3559666 |
| | strand | | |
| rbn | Complementary | 3559663 | 3560535 |
| | strand | | |
| yihX | Complementary | 3560529 | 3561128 |
| | strand | | |
| yihW | Complementary | 3561227 | 3562012 |
| | strand | | |
| yihV | Complementary | 3562046 | 3562942 |
| | strand | | |
| yihU | | 3563110 | 3564006 |
| yihT | | 3564030 | 3564908 |
| yihS | | 3564925 | 3566166 |
| yihR | | 3566280 | 3567206 |
| yihQ | | 3567405 | 3569441 |
| yihP | | 3569466 | 3570872 |
| yihO | | 3570915 | 3572318 |
| ompL | | 3572386 | 3573078 |
| yihN | Complementary | 3573169 | 3574434 |
| | strand | | |
| yihM | Complementary | 3574536 | 3575516 |
| | strand | | |
| yihL | Complementary | 3575524 | 3576234 |
| | strand | | |
| bipA | Complementary | 3576451 | 3578274 |
| | strand | | |
| glnA | | 3578647 | 3580056 |
| glnL | | 3580342 | 3581391 |
| glnG | | 3581403 | 3582812 |
| hemN | Complementary | 3583263 | 3584636 |
| | strand | | |
| yihI | Complementary | 3584825 | 3585334 |
| | strand | | |
| csrC | Complementary | 3585401 | 3585645 |
| | strand | | |
| yihA | | 3585952 | 3586548 |
| spf | Complementary | 3586674 | 3586782 |
| | strand | | |
| polA | Complementary | 3586929 | 3589715 |
| | strand | | |
| yihG | | 3590079 | 3591011 |
| yihF | Complementary | 3591052 | 3592482 |
| | strand | | |
| dsbA | Complementary | 3592637 | 3593263 |
| | strand | | |
| yihE | Complementary | 3593280 | 3594266 |
| | strand | | |
| yihD | Complementary | 3594343 | 3594612 |
| | strand | | |
| mobA | | 3594682 | 3595266 |
| mobB | | 3595263 | 3595775 |
| rrfA | Complementary | 3596045 | 3596164 |
| | strand | | |
| rrlA | Complementary | 3596258 | 3599162 |
| | strand | | |
| alaT | Complementary | 3599346 | 3599421 |
| | strand | | |
| ileT | Complementary | 3599464 | 3599540 |
| | strand | | |
| rrsA | Complementary | 3599609 | 3601150 |
| | strand | | |
| hemG | Complementary | 3601528 | 3602073 |
| | strand | | |
| trkH | Complementary | 3602085 | 3603536 |
| | strand | | |
| yigZ | Complementary | 3603575 | 3604189 |
| | strand | | |
| pepQ | Complementary | 3604189 | 3605520 |
| | strand | | |
| fadB | | 3605710 | 3607899 |
| fadA | | 3607909 | 3609072 |
| fre | Complementary | 3609453 | 3610154 |
| | strand | | |
| ubiD | Complementary | 3610200 | 3611693 |
| | strand | | |
| rfaH | | 3611860 | 3612348 |
| tatD | Complementary | 3612345 | 3613127 |
| | strand | | |
| tatC | Complementary | 3613169 | 3613945 |
| | strand | | |
| tatB | Complementary | 3613948 | 3614463 |
| | strand | | |
| tatA | Complementary | 3614467 | 3614736 |
| | strand | | |
| ubiB | Complementary | 3614815 | 3616455 |
| | strand | | |
| yigP | Complementary | 3616452 | 3617057 |
| | strand | | |
| ubiE | Complementary | 3617071 | 3617826 |
| | strand | | |
| rmuC | Complementary | 3617921 | 3619348 |
| | strand | | |
| udp | Complementary | 3619489 | 3620250 |
| | strand | | |
| ysgA | | 3620512 | 3621327 |
| metE | Complementary | 3621367 | 3623628 |
| | strand | | |
| metR | | 3623865 | 3624818 |
| yigM | Complementary | 3624706 | 3625605 |
| | strand | | |
| yigL | Complementary | 3625681 | 3626481 |
| | strand | | |
| pldB | Complementary | 3626489 | 3627511 |
| | strand | | |
| rhtB | | 3627622 | 3628242 |
| rhtC | Complementary | 3628304 | 3628924 |
| | strand | | |
| recQ | Complementary | 3628988 | 3630817 |
| | strand | | |
| pldA | Complementary | 3630950 | 3631819 |
| | strand | | |
| yigI | | 3631984 | 3632451 |
| rarD | | 3632503 | 3633393 |
| ylgG | | 3633488 | 3633868 |
| yigF | | 3633882 | 3634262 |
| corA | Complementary | 3634305 | 3635255 |
| | strand | | |
| ylgE | | 3635625 | 3636389 |
| uvrD | Complementary | 3636536 | 3638698 |
| | strand | | |
| ylgB | Complementary | 3638782 | 3639498 |
| | strand | | |
| xerC | Complementary | 3639498 | 3640394 |
| | strand | | |
| yigA | Complementary | 3640391 | 3641098 |
| | strand | | |
| dapF | Complementary | 3641095 | 3641919 |
| | strand | | |
| yifL | Complementary | 3641956 | 3642159 |
| | strand | | |
| yzcX | Complementary | 3642346 | 3642831 |
| | strand | | |
| cyaY | | 3642622 | 3642942 |
| cyaA | Complementary | 3642982 | 3645528 |
| | strand | | |
| hemC | | 3645915 | 3646856 |
| hemD | | 3646853 | 3647593 |
| hemX | | 3647615 | 3648796 |
| hemY | | 3648799 | 3649995 |
| ryiA | Complementary | 3650078 | 3650249 |
| | strand | | |
| aslA | | 3650674 | 3652329 |
| aslB | Complementary | 3652488 | 3653723 |
| | strand | | |
| proM | Complementary | 3653870 | 3653946 |
| | strand | | |
| leuT | Complementary | 3653989 | 3654075 |
| | strand | | |
| hisR | Complementary | 3654096 | 3654172 |
| | strand | | |
| argX | Complementary | 3654230 | 3654306 |
| | strand | | |
| ylfK | Complementary | 3654409 | 3655794 |
| | strand | | |
| rffM | Complementary | 3655985 | 3656725 |
| | strand | | |
| wzyE | Complementary | 3656728 | 3658080 |
| | strand | | |
| rffT | Complementary | 3658077 | 3659156 |
| | strand | | |
| wzxE | Complementary | 3659153 | 3660403 |
| | strand | | |
| rffA | Complementary | 3660405 | 3661535 |
| | strand | | |
| rffC | Complementary | 3661540 | 3662085 |
| | strand | | |
| rffH | Complementary | 3662192 | 3663073 |
| | strand | | |
| rffG | Complementary | 3663092 | 3664159 |
| | strand | | |
| rffD | Complementary | 3664159 | 3665421 |
| | strand | | |
| rffE | Complementary | 3665418 | 3666548 |
| | strand | | |
| wzzE | Complementary | 3666604 | 3667650 |
| | strand | | |
| rfe | Complementary | 3667662 | 3668765 |
| | strand | | |
| rho | Complementary | 3669005 | 3670264 |
| | strand | | |
| rhoL | Complementary | 3670349 | 3670450 |
| | strand | | |
| trxA | Complementary | 3670591 | 3670920 |
| | strand | | |
| rhlB | | 3671051 | 3672316 |
| gpp | | 3672452 | 3673936 |
| rep | Complementary | 3673983 | 3676004 |
| | strand | | |
| yifN | | 3676221 | 3676439 |
| yifO | | 3676394 | 3676669 |
| ppiC | | 3676868 | 3677149 |
| ilvC | Complementary | 3677236 | 3678711 |
| | strand | | |
| ilvY | | 3678861 | 3679754 |
| ilvA | Complementary | 3679806 | 3681350 |
| | strand | | |
| ilvD | Complementary | 3681353 | 3683203 |
| | strand | | |
| ilvE | Complementary | 3683268 | 3684197 |
| | strand | | |
| ilvM | Complementary | 3684217 | 3684480 |
| | strand | | |
| ilVG_2 | Complementary | 3684477 | 3685058 |
| | strand | | |
| ilvG_1 | Complementary | 3685138 | 3686121 |
| | strand | | |
| ilvL | Complementary | 3686261 | 3686359 |
| | strand | | |
| yifB | | 3686682 | 3688232 |
| yifE | Complementary | 3688257 | 3688595 |
| | strand | | |
| hdfR | | 3688714 | 3689553 |
| trpT | Complementary | 3689649 | 3689724 |
| | strand | | |
| aspT | Complementary | 3689733 | 3689809 |
| | strand | | |
| rrfC | Complementary | 3689862 | 3689981 |
| | strand | | |
| rrlC | Complementary | 3690074 | 3692977 |
| | strand | | |
| gltU | Complementary | 3693171 | 3693246 |
| | strand | | |
| rrsC | Complementary | 3693332 | 3694873 |
| | strand | | |
| yieP | | 3695354 | 3696046 |
| hsrA | | 3696069 | 3697496 |
| rbsR | Complementary | 3697462 | 3698454 |
| | strand | | |
| rbsK | Complementary | 3698458 | 3699387 |
| | strand | | |
| rbsB | Complementary | 3699513 | 3700403 |
| | strand | | |
| rbsC | Complementary | 3700428 | 3701393 |
| | strand | | |
| rbsA | Complementary | 3701398 | 3702903 |
| | strand | | |
| rbsD | Complementary | 3702911 | 3703330 |
| | strand | | |
| trkD | Complementary | 3703497 | 3705365 |
| | strand | | |
| yieN | | 3705588 | 3707084 |
| yieM | | 3707078 | 3708529 |
| asnA | Complementary | 3708534 | 3709526 |
| | strand | | |
| asnC | | 3709678 | 3710136 |
| mioC | | 3710226 | 3710669 |
| oriC | Complementary | 3710706 | 3710937 |
| | strand | | |
| gidA | | 3711048 | 3712937 |
| gidB | | 3713001 | 3713624 |
| atpI | | 3714241 | 3714621 |
| atpB | | 3714630 | 3715445 |
| atpE | | 3715492 | 3715731 |
| atpF | | 3715793 | 3716263 |
| atpH | | 3716278 | 3716811 |
| atpA | | 3716824 | 3718365 |
| atpG | | 3718416 | 3719279 |
| atpD | | 3719306 | 3720688 |
| atpC | | 3720709 | 3721128 |
| glmU | | 3721481 | 3722851 |
| glmS | | 3723013 | 3724842 |
| pstS | | 3725156 | 3726196 |
| pstC | | 3726283 | 3727242 |
| pstA | | 3727242 | 3728132 |
| pstB | | 3728315 | 3729088 |
| phoU | | 3729103 | 3729828 |
| bglG | | 3730114 | 3730950 |
| bglF | | 3731084 | 3732961 |
| bglB | | 3732980 | 3734392 |
| bglH | | 3734461 | 3736077 |
| yieL | | 3736077 | 3737273 |
| yieK | | 3737288 | 3738010 |
| cbrC | Complementary | 3738072 | 3738659 |
| | strand | | |
| yieI | Complementary | 3738708 | 3739175 |
| | strand | | |
| yieH | Complementary | 3739242 | 3739907 |
| | strand | | |
| yieG | | 3740072 | 3741409 |
| yieF | Complementary | 3741463 | 3742029 |
| | strand | | |
| yieE | Complementary | 3742051 | 3742812 |
| | strand | | |
| insD | Complementary | 3742944 | 3743867 |
| | strand | | |
| insC | Complementary | 3743807 | 3744172 |
| | strand | | |
| yidZ | Complementary | 3744293 | 3745252 |
| | strand | | |
| mdtL | Complementary | 3745227 | 3746402 |
| | strand | | |
| tnaB | Complementary | 3746534 | 3748980 |
| | strand | | |
| insH | | 3746979 | 3747959 |
| tnaA | Complementary | 3749071 | 3750486 |
| | strand | | |
| insH | | 3750659 | 3751639 |
| tnaC | Complementary | 3751906 | 3751980 |
| | strand | | |
| trmE | Complementary | 3752223 | 3753587 |
| | strand | | |
| yidC | Complementary | 3753693 | 3755339 |
| | strand | | |
| yidD | Complementary | 3755342 | 3755599 |
| | strand | | |
| rnpA | Complementary | 3755563 | 3755922 |
| | strand | | |
| rpmH | Complementary | 3755939 | 3756079 |
| | strand | | |
| dnaA | | 3756686 | 3758089 |
| dnaN | | 3758094 | 3759194 |
| recF | | 3759194 | 3760267 |
| gyrB | | 3760296 | 3762710 |
| yidB | | 3762950 | 3763348 |
| yidA | | 3763463 | 3764275 |
| yidX | Complementary | 3764321 | 3764977 |
| | strand | | |
| dgoR | | 3765255 | 3765944 |
| dgoK | | 3765941 | 3766819 |
| dgoA | | 3766803 | 3767420 |
| dgoD | | 3767417 | 3768565 |
| dgoT | | 3768685 | 3769977 |
| cbrA | Complementary | 3769974 | 3771038 |
| | strand | | |
| yidR | | 3771139 | 3772353 |
| yidQ | Complementary | 3772355 | 3772687 |
| | strand | | |
| ibpA | | 3772993 | 3773406 |
| ibpB | | 3773518 | 3773946 |
| yidE | | 3774142 | 3775803 |
| yidP | Complementary | 3775800 | 3776516 |
| | strand | | |
| givC | | 3776812 | 3777918 |
| givB | | 3777943 | 3778428 |
| givG | | 3778428 | 3779066 |
| ysdC | | 3779066 | 3779242 |
| yidL | Complementary | 3779239 | 3780162 |
| | strand | | |
| yidK | | 3780299 | 3782014 |
| yidJ | | 3782011 | 3783504 |
| yidI | Complementary | 3783551 | 3784000 |
| | strand | | |
| yidH | | 3784108 | 3784455 |
| yidG | | 3784445 | 3784807 |
| yidF | | 3784804 | 3785301 |
| emrD | Complementary | 3785309 | 3786493 |
| | strand | | |
| ivbL | | 3787427 | 3787525 |
| ilvB | | 3787631 | 3789319 |
| ilvN | | 3789323 | 3789613 |
| uhpA | | 3789689 | 3790279 |
| uhpB | | 3790279 | 3791781 |
| uhpC | | 3791791 | 3793110 |
| uhpT | | 3793248 | 3794639 |
| ade | Complementary | 3794685 | 3796451 |
| | strand | | |
| yicO | | 3796626 | 3797960 |
| yicN | | 3798013 | 3798465 |
| yicM | | 3798511 | 3799866 |
| yicS | Complementary | 3799907 | 3800200 |
| | strand | | |
| nlpA | | 3800422 | 3801240 |
| yicL | Complementary | 3801244 | 3802167 |
| | strand | | |
| setC | Complementary | 3802278 | 3803462 |
| | strand | | |
| setC | Complementary | 3804099 | 3804193 |
| | strand | | |
| yicJ | | 3804486 | 3805868 |
| yicI | | 3805878 | 3808196 |
| yicH | Complementary | 3808249 | 3809958 |
| | strand | | |
| yicE | Complementary | 3810079 | 3811470 |
| | strand | | |
| gltS | | 3811750 | 3812955 |
| recG | Complementary | 3813124 | 3815205 |
| | strand | | |
| trmH | Complementary | 3815211 | 3815900 |
| | strand | | |
| spoT | Complementary | 3815907 | 3818015 |
| | strand | | |
| rpoZ | Complementary | 3818034 | 3818309 |
| | strand | | |
| gmk | Complementary | 3818364 | 3818987 |
| | strand | | |
| ligB | | 3819245 | 3820927 |
| yicG | Complementary | 3820924 | 3821541 |
| | strand | | |
| dinD | Complementary | 3821831 | 3822655 |
| | strand | | |
| yicC | Complementary | 3822876 | 3823739 |
| | strand | | |
| rph | | 3823866 | 3824552 |
| pyrE | | 3824647 | 3825288 |
| ttk | Complementary | 3825325 | 3825921 |
| | strand | | |
| dut | Complementary | 3826028 | 3826483 |
| | strand | | |
| dfp | Complementary | 3826464 | 3827684 |
| | strand | | |
| yicR | | 3827856 | 3828524 |
| rpmB | | 3828741 | 3828977 |
| rpmG | | 3828998 | 3829165 |
| mutM | | 3829263 | 3830072 |
| coaD | Complementary | 3830111 | 3830590 |
| | strand | | |
| kdtA | Complementary | 3830598 | 3831875 |
| | strand | | |
| rfaQ | | 3832317 | 3833351 |
| rfaG | | 3833348 | 3834472 |
| rfaP | | 3834465 | 3835262 |
| rfaS | | 3835299 | 3836234 |
| rfaB | | 3836248 | 3837357 |
| rfaI | | 3837357 | 3838376 |
| rfaJ | | 3838416 | 3839432 |
| rfaY | | 3839450 | 3840148 |
| rfaZ | | 3840219 | 3841070 |
| rfaK | | 3841103 | 3842176 |
| rfaL | Complementary | 3842208 | 3843467 |
| | strand | | |
| rfaC | Complementary | 3843477 | 3844436 |
| | strand | | |
| rfaF | Complementary | 3844440 | 3845486 |
| | strand | | |
| rfaD | Complementary | 3845496 | 3846428 |
| | strand | | |
| htrL | | 3846732 | 3847589 |
| kbl | | 3847864 | 3849060 |
| tdh | | 3849070 | 3850095 |
| yibD | | 3850334 | 3851368 |
| yibQ | Complementary | 3851355 | 3852314 |
| | strand | | |
| enyC | Complementary | 3852318 | 3853577 |
| | strand | | |
| gpmI | Complementary | 3853611 | 3855155 |
| | strand | | |
| yibN | | 3855400 | 3855831 |
| grxC | | 3855973 | 3856224 |
| secB | | 3856287 | 3856754 |
| gpsA | | 3856754 | 3857773 |
| cysE | | 3857853 | 3858674 |
| yibK | Complementary | 3858727 | 3859200 |
| | strand | | |
| lldD | Complementary | 3859398 | 3860588 |
| | strand | | |
| lldR | Complementary | 3860585 | 3861361 |
| | strand | | |
| lldP | Complementary | 3861361 | 3863016 |
| | strand | | |
| yibL | Complementary | 3863388 | 3863750 |
| | strand | | |
| yibT | | 3864035 | 3864244 |
| mtlR | Complementary | 3864256 | 3864843 |
| | strand | | |
| mtlD | Complementary | 3864843 | 3865991 |
| | strand | | |
| mtlA | Complementary | 3866221 | 3868134 |
| | strand | | |
| yibI | | 3868671 | 3869033 |
| yibH | | 3869036 | 3870172 |
| yibG | Complementary | 3871777 | 3872238 |
| | strand | | |
| yibJ | Complementary | 3872493 | 3873194 |
| | strand | | |
| yibA | Complementary | 3873236 | 3874078 |
| | strand | | |
| rhsA | Complementary | 3874099 | 3878232 |
| | strand | | |
| yibF | | 3878460 | 3879068 |
| selA | | 3879166 | 3880557 |
| selB | | 3880554 | 3882398 |
| yiaY | | 3882588 | 3883739 |
| aldB | | 3883904 | 3885442 |
| yiaW | | 3885987 | 3886310 |
| yiaV | | 3886316 | 3887452 |
| yiaU | Complementary | 3887449 | 3888423 |
| | strand | | |
| yiaT | | 3888547 | 3889287 |
| sgbE | Complementary | 3889634 | 3890329 |
| | strand | | |
| sgbU | Complementary | 3890323 | 3891183 |
| | strand | | |
| sgbH | Complementary | 3891176 | 3891838 |
| | strand | | |
| lyxK | Complementary | 3891835 | 3893331 |
| | strand | | |
| yiaO | Complementary | 3893335 | 3894321 |
| | strand | | |
| yiaN | Complementary | 3894334 | 3895611 |
| | strand | | |
| yiaM | Complementary | 3895614 | 3896087 |
| | strand | | |
| yiaL | Complementary | 3896205 | 3896672 |
| | strand | | |
| yiaK | Complementary | 3896684 | 3897682 |
| | strand | | |
| yiaJ | | 3897883 | 3898731 |
| yiaI | | 3898833 | 3899306 |
| avtA | Complementary | 3899457 | 3900710 |
| | strand | | |
| malS | Complementary | 3900888 | 3902918 |
| | strand | | |
| bax | | 3903238 | 3904062 |
| xylR | Complementary | 3904258 | 3905436 |
| | strand | | |
| xylH | Complementary | 3905514 | 3906695 |
| | strand | | |
| xylG | Complementary | 3906673 | 3908214 |
| | strand | | |
| xylF | Complementary | 3908292 | 3909284 |
| | strand | | |
| xylA | | 3909650 | 3910972 |
| xylB | | 3911044 | 3912498 |
| yiaB | | 3912667 | 3913008 |
| yiaA | | 3913054 | 3913491 |
| yiaH | Complementary | 3913533 | 3914528 |
| | strand | | |
| ysaB | | 3914703 | 3915002 |
| glyQ | | 3915097 | 3916008 |
| glyS | | 3916018 | 3918087 |
| insK | Complementary | 3918366 | 3919217 |
| | strand | | |
| insJ | Complementary | 3919214 | 3919735 |
| | strand | | |
| hokA | | 3919815 | 3919967 |
| cspA | Complementary | 3920154 | 3920366 |
| | strand | | |
| yiaG | Complementary | 3920647 | 3920937 |
| | strand | | |
| yiaF | | 3921371 | 3922081 |
| tlaE | Complementary | 3922131 | 3923105 |
| | strand | | |
| yiaD | Complementary | 3923209 | 3923868 |
| | strand | | |
| bisC | | 3924075 | 3926354 |
| yiaC | Complementary | 3926323 | 3926763 |
| | strand | | |
| tag | Complementary | 3926760 | 3927323 |
| | strand | | |
| yhjY | | 3927481 | 3928179 |
| yhjX | | 3928408 | 3929616 |
| eptB | | 3929940 | 3931631 |
| proK | | 3931723 | 3931799 |
| dppA | | 3932710 | 3934317 |
| dppB | | 3934625 | 3935644 |
| dppC | | 3935654 | 3936556 |
| dppD | | 3936567 | 3937550 |
| dppF | | 3937547 | 3938551 |
| yhjV | Complementary | 3938581 | 3939852 |
| | strand | | |
| rdlD | Complementary | 3940216 | 3940279 |
| | strand | | |
| ldrD | | 3940328 | 3940435 |
| bcsG | Complementary | 3940522 | 3942201 |
| | strand | | |
| bcsF | Complementary | 3942198 | 3942389 |
| | strand | | |
| bcsE | Complementary | 3942386 | 3943957 |
| | strand | | |
| yhjR | | 3944230 | 3944418 |
| YhjQ | | 3944454 | 3945182 |
| bcsA | | 3945179 | 3947797 |
| bcsB | | 3947808 | 3950147 |
| bcsZ | | 3950154 | 3951260 |
| bcsC | | 3951242 | 3954715 |
| yhjK | | 3954836 | 3956785 |
| dctA | | 3956968 | 3958254 |
| yhjJ | | 3958475 | 3959971 |
| kdgK | Complementary | 3960067 | 3960996 |
| | strand | | |
| yhjH | | 3961228 | 3961995 |
| yhjG | | 3962050 | 3964125 |
| yhjE | Complementary | 3964307 | 3965629 |
| | strand | | |
| yhjD | Complementary | 3966040 | 3967053 |
| | strand | | |
| yhjC | Complementary | 3967102 | 3968073 |
| | strand | | |
| yhjB | | 3968521 | 3969123 |
| treF | Complementary | 3969174 | 3970823 |
| | strand | | |
| yhjA | | 3971227 | 3972624 |
| gadA | | 3972835 | 3974235 |
| gadX | | 3974605 | 3975429 |
| gadY | Complementary | 3975447 | 3975551 |
| | strand | | |
| gadW | | 3975797 | 3976525 |
| mdtF | Complementary | 3976888 | 3980001 |
| | strand | | |
| mdtE | Complementary | 3980026 | 3981183 |
| | strand | | |
| gadE | Complementary | 3981522 | 3982049 |
| | strand | | |
| hdeD | Complementary | 3982848 | 3983420 |
| | strand | | |
| hdeA | | 3983675 | 3984007 |
| hdeB | | 3984123 | 3984449 |
| yhiD | | 3984513 | 3985160 |
| yhiF | Complementary | 3985202 | 3985732 |
| | strand | | |
| slp | Complementary | 3985888 | 3986454 |
| | strand | | |
| insH-11 | | 3987217 | 3988233 |
| yhiS | Complementary | 3988342 | 3989124 |
| | strand | | |
| arsC | Complementary | 3989753 | 3990178 |
| | strand | | |
| arsB | Complementary | 3990191 | 3991480 |
| | strand | | |
| arsR | Complementary | 3991534 | 3991887 |
| | strand | | |
| gor | Complementary | 3992764 | 3994116 |
| | strand | | |
| yhlR | Complementary | 3994188 | 3995030 |
| | strand | | |
| priC | | 3995233 | 3997275 |
| yhiQ | | 3997283 | 3998035 |
| yhiP | Complementary | 3998084 | 3999553 |
| | strand | | |
| uspA | Complementary | 3999870 | 4000304 |
| | strand | | |
| yhiO | | 4000695 | 4001030 |
| pitA | Complementary | 4001274 | 4002773 |
| | strand | | |
| yhiN | | 4003005 | 4004207 |
| yhiM | Complementary | 4004522 | 4005574 |
| | strand | | |
| yhiL | | 4005957 | 4007195 |
| yhiK | | 4007171 | 4007563 |
| yhiJ | | 4007825 | 4009447 |
| yhiI | | 4009813 | 4010880 |
| rbbA | | 4010877 | 4013612 |
| yhhJ | | 4013612 | 4014736 |
| yhhI | Complementary | 4014901 | 4016037 |
| | strand | | |
| yrhC | Complementary | 4016283 | 4016528 |
| | strand | | |
| yhhH | Complementary | 4016633 | 4017016 |
| | strand | | |
| rhsB | Complementary | 4016988 | 4021223 |
| | strand | | |
| nikR | Complementary | 4021426 | 4021827 |
| | strand | | |
| nikE | Complementary | 4021833 | 4022639 |
| | strand | | |
| nikD | Complementary | 4022636 | 4023400 |
| | strand | | |
| nikC | Complementary | 4023400 | 4024233 |
| | strand | | |
| nikB | Complementary | 4024230 | 4025174 |
| | strand | | |
| nikA | Complementary | 4025174 | 4026748 |
| | strand | | |
| acpT | Complementary | 4026859 | 4027446 |
| | strand | | |
| yhhT | Complementary | 4027501 | 4028550 |
| | strand | | |
| yhhS | | 4028682 | 4029899 |
| dcrB | Complementary | 4029903 | 4030460 |
| | strand | | |
| yhhQ | Complementary | 4030533 | 4031198 |
| | strand | | |
| yhhP | | 4031419 | 4031664 |
| zntA | Complementary | 4031766 | 4033964 |
| | strand | | |
| yhhN | Complementary | 4034038 | 4034664 |
| | strand | | |
| yhhM | | 4034805 | 4035164 |
| yhhL | Complementary | 4035167 | 4035436 |
| | strand | | |
| yhhF | Complementary | 4035426 | 4036022 |
| | strand | | |
| ftsY | | 4036172 | 4037665 |
| ftsE | | 4037668 | 4038336 |
| ftsX | | 4038329 | 4039387 |
| rpoH | | 4039632 | 4040486 |
| livJ | | 4040757 | 4041860 |
| yhhK | Complementary | 4042048 | 4042431 |
| | strand | | |
| livK | | 4042855 | 4043964 |
| livH | | 4044012 | 4044938 |
| livM | | 4044935 | 4046212 |
| livG | | 4046209 | 4046976 |
| livF | | 4046978 | 4047691 |
| ugpB | | 4048090 | 4049406 |
| ugpA | | 4049504 | 4050391 |
| ugpE | | 4050388 | 4051233 |
| ugpC | | 4051235 | 4052305 |
| ugpQ | | 4052302 | 4053045 |
| yhhA | Complementary | 4053032 | 4053472 |
| | strand | | |
| ggt | | 4053592 | 4055334 |
| yrhB | Complementary | 4055372 | 4055656 |
| | strand | | |
| insB-6 | Complementary | 4056235 | 4056738 |
| | strand | | |
| insA-6 | Complementary | 4056657 | 4056932 |
| | strand | | |
| yrhA | Complementary | 4056961 | 4057374 |
| | strand | | |
| yhhZ | Complementary | 4057374 | 4058552 |
| | strand | | |
| yhhY | Complementary | 4058789 | 4059277 |
| | strand | | |
| ryhB | | 4059399 | 4059492 |
| yhhX | | 4059610 | 4060647 |
| yhhW | | 4060770 | 4061465 |
| gntR | | 4061689 | 4062684 |
| gntK | | 4062823 | 4063350 |
| gntU | | 4063354 | 4064694 |
| yhgN | Complementary | 4064751 | 4065344 |
| | strand | | |
| asd | | 4065537 | 4066640 |
| glgB | | 4066913 | 4069099 |
| glgX | | 4069096 | 4071069 |
| glgC | | 4071087 | 4072382 |
| glgA | | 4072382 | 4073815 |
| glgP | | 4073834 | 4076281 |
| yzgL | | 4076410 | 4076691 |
| glpD | Complementary | 4076897 | 4078402 |
| | strand | | |
| glpE | | 4078592 | 4078918 |
| glpG | | 4078963 | 4079793 |
| glpR | | 4079810 | 4080568 |
| rtcR | Complementary | 4080550 | 4082148 |
| | strand | | |
| rtcB | | 4082337 | 4083563 |
| rtcA | | 4083567 | 4084583 |
| malT | Complementary | 4084626 | 4087331 |
| | strand | | |
| malP | | 4087943 | 4090336 |
| malQ | | 4090346 | 4092430 |
| gntT | Complementary | 4092541 | 4093857 |
| | strand | | |
| gntY | Complementary | 4094217 | 4094792 |
| | strand | | |
| gntX | Complementary | 4094851 | 4095534 |
| | strand | | |
| bioH | | 4095572 | 4096342 |
| yhgA | Complementary | 4096371 | 4097249 |
| | strand | | |
| yhgG | Complementary | 4097452 | 4097688 |
| | strand | | |
| feoB | Complementary | 4097688 | 4100009 |
| | strand | | |
| feoA | Complementary | 4100026 | 4100253 |
| | strand | | |
| yhgF | Complementary | 4100710 | 4103031 |
| | strand | | |
| greB | Complementary | 4103128 | 4103604 |
| | strand | | |
| ompR | | 4103832 | 4104551 |
| envZ | | 4104548 | 4105900 |
| pck | Complementary | 4105976 | 4107598 |
| | strand | | |
| yhgE | | 4107977 | 4109701 |
| hslO | Complementary | 4109764 | 4110642 |
| | strand | | |
| hslR | Complementary | 4110667 | 4111068 |
| | strand | | |
| yrfG | Complementary | 4111079 | 4111747 |
| | strand | | |
| yrfF | Complementary | 4111812 | 4113947 |
| | strand | | |
| nudE | | 4114267 | 4114827 |
| mrcA | Complementary | 4114993 | 4117545 |
| | strand | | |
| yrfD | | 4117665 | 4118444 |
| yrfC | | 4118444 | 4118983 |
| yrfB | | 4118967 | 4119407 |
| yrfA | | 4119397 | 4119801 |
| hofQ | | 4119713 | 4120951 |
| aroK | | 4121352 | 4121873 |
| aroB | | 4121930 | 4123018 |
| damX | | 4123110 | 4124396 |
| dam | | 4124503 | 4125339 |
| rpe | | 4125357 | 4126034 |
| gph | | 4126027 | 4126785 |
| trpS | | 4126778 | 4127782 |
| yhfZ | | 4128072 | 4128977 |
| yhfY | | 4128994 | 4129356 |
| yhfX | | 4129440 | 4130603 |
| yhfW | | 4130603 | 4131829 |
| php | | 4131826 | 4132704 |
| yhfU | | 4132715 | 4133068 |
| yhfT | | 4133080 | 4134384 |
| yhfS | | 4134396 | 4135481 |
| frlR | Complementary | 4135633 | 4136364 |
| | strand | | |
| frlD | Complementary | 4136464 | 4137249 |
| | strand | | |
| frlC | Complementary | 4137246 | 4138076 |
| | strand | | |
| frlB | Complementary | 4138126 | 4139148 |
| | strand | | |
| frlA | Complementary | 4139169 | 4140506 |
| | strand | | |
| yhfL | Complementary | 4140801 | 4140968 |
| | strand | | |
| cysG | Complementary | 4141215 | 4142588 |
| | strand | | |
| nlrC | Complementary | 4142607 | 4143413 |
| | strand | | |
| nlrD | Complementary | 4143539 | 4143865 |
| | strand | | |
| nlrB | Complementary | 4143862 | 4146405 |
| | strand | | |
| tsgA | Complementary | 4146667 | 4147848 |
| | strand | | |
| ppiA | | 4148119 | 4148691 |
| yhfG | | 4148796 | 4148963 |
| flc | | 4148953 | 4149555 |
| pabA | | 4149587 | 4150150 |
| argD | | 4150236 | 4151456 |
| yhfK | Complementary | 4151523 | 4153625 |
| | strand | | |
| crp | Complementary | 4153664 | 4154296 |
| | strand | | |
| yhfA | | 4154598 | 4155002 |
| prkB | Complementary | 4155057 | 4155926 |
| | strand | | |
| yheU | Complementary | 4155980 | 4156198 |
| | strand | | |
| yheT | Complementary | 4156192 | 4157214 |
| | strand | | |
| yheS | Complementary | 4157214 | 4159127 |
| | strand | | |
| kefG | | 4159255 | 4159809 |
| kefB | | 4159809 | 4161614 |
| yheV | | 4161624 | 4161824 |
| slyD | | 4161919 | 4162509 |
| slyX | Complementary | 4162558 | 4162776 |
| | strand | | |
| fkpA | | 4162997 | 4163809 |
| yheO | | 4163976 | 4164698 |
| yheN | | 4164698 | 4165084 |
| yheM | | 4165084 | 4165443 |
| yheL | | 4165451 | 4165738 |
| rpsL | | 4165864 | 4166238 |
| rpsG | | 4166335 | 4166874 |
| fusA | | 4166902 | 4169016 |
| tufA | | 4169087 | 4170271 |
| chlA | | 4170563 | 4173256 |
| bfd | | 4173425 | 4173619 |
| bfr | | 4173691 | 4174167 |
| gspO | Complementary | 4174196 | 4174873 |
| | strand | | |
| gspM | Complementary | 4174873 | 4175334 |
| | strand | | |
| gspL | Complementary | 4175331 | 4176494 |
| | strand | | |
| gspK | Complementary | 4176509 | 4177492 |
| | strand | | |
| gspJ | Complementary | 4177485 | 4178072 |
| | strand | | |
| gspI | Complementary | 4178065 | 4178442 |
| | strand | | |
| gspH | Complementary | 4178439 | 4178948 |
| | strand | | |
| gspG | Complementary | 4178956 | 4179393 |
| | strand | | |
| gspF | Complementary | 4179403 | 4180599 |
| | strand | | |
| gspE | Complementary | 4180596 | 4182077 |
| | strand | | |
| gspD | Complementary | 4182087 | 4184039 |
| | strand | | |
| gspC | Complementary | 4184023 | 4184838 |
| | strand | | |
| gspA | | 4185018 | 4186487 |
| pioO | | 4186489 | 4186908 |
| rpsJ | | 4187146 | 4187457 |
| rplC | | 4187490 | 4188119 |
| rplD | | 4188130 | 4188735 |
| rplW | | 4188732 | 4189034 |
| rplB | | 4189052 | 4189873 |
| rpsS | | 4189890 | 4190168 |
| rplV | | 4190183 | 4190515 |
| rpsC | | 4190533 | 4191234 |
| rplP | | 4191247 | 4191657 |
| rpmC | | 4191657 | 4191848 |
| rpsQ | | 4191848 | 4192102 |
| rplN | | 4192267 | 4192638 |
| rplX | | 4192649 | 4192963 |
| rplE | | 4192978 | 4193517 |
| rpsN | | 4193532 | 4193837 |
| rpsH | | 4193871 | 4194263 |
| rplF | | 4194276 | 4194809 |
| rplR | | 4194819 | 4195172 |
| rpsE | | 4195187 | 4195690 |
| rpmD | | 4195694 | 4195873 |
| rplO | | 4195877 | 4196311 |
| secY | | 4196319 | 4197650 |
| rpmJ | | 4197682 | 4197798 |
| rpsM | | 4197945 | 4198301 |
| rpsK | | 4198318 | 4198707 |
| rpsD | | 4198741 | 4199361 |
| rpoA | | 4199387 | 4200376 |
| rplQ | | 4200417 | 4200800 |
| yhdN | | 4200907 | 4201275 |
| zntR | | 4201286 | 4201711 |
| yhdL | | 4201767 | 4201985 |
| mscL | Complementary | 4201982 | 4202392 |
| | strand | | |
| trkA | Complementary | 4202522 | 4203898 |
| | strand | | |
| rsmB | Complementary | 4203920 | 4205209 |
| | strand | | |
| fmt | Complementary | 4205255 | 4206202 |
| | strand | | |
| def | Complementary | 4206217 | 4206726 |
| | strand | | |
| smf | | 4206856 | 4207980 |
| smg | | 4207952 | 4208425 |
| yrdD | | 4208454 | 4208996 |
| yrdC | | 4209001 | 4209573 |
| aroE | | 4209578 | 4210396 |
| yrdB | | 4210393 | 4210650 |
| yrdA | Complementary | 4210626 | 4211180 |
| | strand | | |
| rrsE | | 4211654 | 4213195 |
| ileU | | 4213264 | 4213340 |
| alaU | | 4213383 | 4213458 |
| rrlE | | 4213633 | 4216536 |
| rrfE | | 4216630 | 4216749 |
| yjaA | | 4216824 | 4217207 |
| yjaB | Complementary | 4217270 | 4217713 |
| | strand | | |
| metA | | 4217870 | 4218799 |
| aceB | | 4219068 | 4220669 |
| aceA | | 4220699 | 4222003 |
| aceK | | 4222186 | 4223922 |
| arpA | Complementary | 4223891 | 4226077 |
| | strand | | |
| iclR | Complementary | 4226394 | 4227218 |
| | strand | | |
| metH | | 4227418 | 4231101 |
| yjbB | | 4231321 | 4232952 |
| pepE | Complementary | 4233043 | 4233732 |
| | strand | | |
| yjbC | | 4233944 | 4234816 |
| yjbD | Complementary | 4234949 | 4235221 |
| | strand | | |
| lysC | Complementary | 4235474 | 4236823 |
| | strand | | |
| pgi | | 4237348 | 4238997 |
| yjbE | | 4239498 | 4239738 |
| yjbF | | 4239852 | 4240490 |
| yjbG | | 4240487 | 4241224 |
| yjbH | | 4241224 | 4243320 |
| yjbA | | 4243915 | 4244325 |
| xylE | Complementary | 4244369 | 4245844 |
| | strand | | |
| malG | Complementary | 4246216 | 4247106 |
| | strand | | |
| malF | Complementary | 4247121 | 4248665 |
| | strand | | |
| malE | Complementary | 4248819 | 4250009 |
| | strand | | |
| malK | | 4250374 | 4251489 |
| lamB | | 4251561 | 4252901 |
| malM | | 4253144 | 4254064 |
| yjbI | | 4254545 | 4255873 |
| ubiC | | 4256096 | 4256593 |
| ubiA | | 4256606 | 4257478 |
| plsB | Complementary | 4257633 | 4260056 |
| | strand | | |
| dgkA | | 4260227 | 4260595 |
| lexA | | 4260705 | 4261313 |
| dinF | | 4261332 | 4262711 |
| yjbJ | | 4262827 | 4263036 |
| zur | Complementary | 4263078 | 4263593 |
| | strand | | |
| yjbL | | 4263911 | 4264165 |
| yjbM | | 4264189 | 4264896 |
| yjbN | | 4265259 | 4266296 |
| yjbO | | 4266430 | 4266672 |
| qor | Complementary | 4266838 | 4267821 |
| | strand | | |
| dnaB | | 4267904 | 4269319 |
| alr | | 4269372 | 4270451 |
| tyrB | | 4270704 | 4271897 |
| aphA | | 4273004 | 4273717 |
| yjbQ | | 4273828 | 4274244 |
| yjbR | | 4274248 | 4274604 |
| uvrA | Complementary | 4274639 | 4277461 |
| | strand | | |
| ssb | | 4277715 | 4278251 |
| yjcB | Complementary | 4278350 | 4278631 |
| | strand | | |
| yjcC | | 4279061 | 4280647 |
| soxS | Complementary | 4280650 | 4280973 |
| | strand | | |
| soxR | | 4281059 | 4281523 |
| ryjA | Complementary | 4281517 | 4281656 |
| | strand | | |
| yjcD | | 4282069 | 4283418 |
| yjcE | | 4283570 | 4285219 |
| yjcF | Complementary | 4285373 | 4286665 |
| | strand | | |
| actP | Complementary | 4286843 | 4288492 |
| | strand | | |
| yjcH | Complementary | 4288489 | 4288803 |
| | strand | | |
| acs | Complementary | 4289003 | 4290961 |
| | strand | | |
| nrfA | | 4291354 | 4292790 |
| nrfB | | 4292835 | 4293401 |
| nrfC | | 4293398 | 4294069 |
| nrfD | | 4294066 | 4295022 |
| nrfE | | 4295102 | 4296760 |
| nrfF | | 4296753 | 4297136 |
| nrfG | | 4297133 | 4297729 |
| gltP | | 4298071 | 4299384 |
| yjcO | Complementary | 4299915 | 4300604 |
| | strand | | |
| fdhF | Complementary | 4300698 | 4302845 |
| | strand | | |
| yjcP | Complementary | 4303043 | 4304509 |
| | strand | | |
| yjcQ | Complementary | 4304506 | 4306557 |
| | strand | | |
| yjcR | Complementary | 4306557 | 4307588 |
| | strand | | |
| yjcS | Complementary | 4308091 | 4310076 |
| | strand | | |
| insH | | 4310431 | 4311411 |
| alsK | Complementary | 4311449 | 4312477 |
| | strand | | |
| alsE | Complementary | 4312461 | 4313156 |
| | strand | | |
| alsC | Complementary | 4313167 | 4314147 |
| | strand | | |
| alsA | Complementary | 4314126 | 4315658 |
| | strand | | |
| alsB | Complementary | 4315785 | 4316720 |
| | strand | | |
| rplR | Complementary | 4316779 | 4317669 |
| | strand | | |
| rpiB | | 4318028 | 4318477 |
| yjdP | | 4318546 | 4318875 |
| phnP | Complementary | 4319022 | 4319780 |
| | strand | | |
| phnO | Complementary | 4319782 | 4320216 |
| | strand | | |
| phnN | Complementary | 4320203 | 4320760 |
| | strand | | |
| phnM | Complementary | 4320760 | 4321896 |
| | strand | | |
| phnL | Complementary | 4321893 | 4322573 |
| | strand | | |
| phnK | Complementary | 4322684 | 4323442 |
| | strand | | |
| phnJ | Complementary | 4323439 | 4324284 |
| | strand | | |
| phnI | Complementary | 4324277 | 4325341 |
| | strand | | |
| phnH | Complementary | 4325341 | 4325925 |
| | strand | | |
| phnG | Complementary | 4325922 | 4326374 |
| | strand | | |
| phnF | Complementary | 4326375 | 4327100 |
| | strand | | |
| phnE(JW4064) | Complementary | 4327121 | 4327489 |
| | strand | | |
| phnE(JW4065) | Complementary | 4327339 | 4327959 |
| | strand | | |
| phnD | Complementary | 4328014 | 4329030 |
| | strand | | |
| phnC | Complementary | 4329055 | 4329843 |
| | strand | | |
| phnB | Complementary | 4329976 | 4330419 |
| | strand | | |
| phnA | Complementary | 4331077 | 4331412 |
| | strand | | |
| yjdA | | 4331813 | 4334041 |
| yjcZ | | 4334038 | 4334916 |
| proP | | 4335180 | 4336682 |
| basS | Complementary | 4336859 | 4337950 |
| | strand | | |
| basR | Complementary | 4337960 | 4338628 |
| | strand | | |
| eptA | Complementary | 4338625 | 4340268 |
| | strand | | |
| adiC | Complementary | 4340372 | 4341709 |
| | strand | | |
| adiY | Complementary | 4341846 | 4342607 |
| | strand | | |
| adiA | Complementary | 4342932 | 4345202 |
| | strand | | |
| melR | Complementary | 4345398 | 4346306 |
| | strand | | |
| melA | | 4346589 | 4347944 |
| melB | | 4348059 | 4349468 |
| yjdF | Complementary | 4349607 | 4350236 |
| | strand | | |
| fumB | Complementary | 4350358 | 4352004 |
| | strand | | |
| dcuB | Complementary | 4352082 | 4353422 |
| | strand | | |
| dcuR | Complementary | 4353993 | 4354712 |
| | strand | | |
| dcuS | Complementary | 4354709 | 4356340 |
| | strand | | |
| yjdI | | 4356521 | 4356751 |
| yjdJ | | 4356763 | 4357035 |
| yjdK | | 4357262 | 4357558 |
| yjdO | | 4357586 | 4357759 |
| lysU | Complementary | 4357878 | 4359395 |
| | strand | | |
| yjdL | Complementary | 4359632 | 4361089 |
| | strand | | |
| cadA | Complementary | 4361148 | 4363295 |
| | strand | | |
| cadB | Complementary | 4363375 | 4364709 |
| | strand | | |
| cadC | Complementary | 4365074 | 4366612 |
| | strand | | |
| pheU | Complementary | 4367229 | 4367304 |
| | strand | | |
| yjdC | Complementary | 4367411 | 4367986 |
| | strand | | |
| dipZ | Complementary | 4368023 | 4369720 |
| | strand | | |
| cutA | Complementary | 4369696 | 4370034 |
| | strand | | |
| dcuA | Complementary | 4370150 | 4371265 |
| | strand | | |
| aspA | Complementary | 4371571 | 4373007 |
| | strand | | |
| fxsA | | 4373344 | 4373820 |
| yjeH | Complementary | 4373836 | 4375092 |
| | strand | | |
| groS | | 4375368 | 4375661 |
| groL | | 4375705 | 4377351 |
| yjeI | | 4377489 | 4377842 |
| yjeJ | Complementary | 4378045 | 4378914 |
| | strand | | |
| yjeK | Complementary | 4379309 | 4380337 |
| | strand | | |
| efp | | 4380379 | 4380945 |
| ecnA | | 4380997 | 4381122 |
| ecnB | | 4381233 | 4381379 |
| sugE | | 4381555 | 4381872 |
| blc | Complementary | 4381869 | 4382402 |
| | strand | | |
| ampC | Complementary | 4382491 | 4383624 |
| | strand | | |
| frdD | Complementary | 4383687 | 4384046 |
| | strand | | |
| frdC | Complementary | 4384057 | 4384452 |
| | strand | | |
| frdB | Complementary | 4384463 | 4385197 |
| | strand | | |
| frdA | Complementary | 4385190 | 4386998 |
| | strand | | |
| poxA | | 4387323 | 4388300 |
| yjeM | | 4388519 | 4390021 |
| yjeN | | 4390073 | 4390387 |
| yjeO | | 4390384 | 4390698 |
| yjeP | Complementary | 4390727 | 4394050 |
| | strand | | |
| psd | Complementary | 4394072 | 4395040 |
| | strand | | |
| rsgA | Complementary | 4395137 | 4396189 |
| | strand | | |
| orn | | 4396284 | 4396829 |
| glyV | | 4397040 | 4397115 |
| glyX | | 4397152 | 4397227 |
| glyY | | 4397263 | 4397338 |
| yjeS | Complementary | 4397608 | 4398747 |
| | strand | | |
| yjeF | | 4398746 | 4400293 |
| yjeE | | 4400265 | 4400726 |
| amlB | | 4400745 | 4402082 |
| mulL | | 4402092 | 4403939 |
| miaA | | 4403932 | 4404882 |
| hfq | | 4404968 | 4405276 |
| hflX | | 4405352 | 4406632 |
| hflK | | 4406718 | 4407977 |
| hflC | | 4407980 | 4408984 |
| yjeT | | 4409066 | 4409263 |
| purA | | 4409367 | 4410665 |
| yjeB | | 4410870 | 4411295 |
| rnr | | 4411334 | 4413775 |
| rlmB | | 4413955 | 4414686 |
| yjfI | | 4414813 | 4415214 |
| yjfJ | | 4415233 | 4415931 |
| yjfK | | 4415982 | 4416641 |
| yjfL | | 4416659 | 4417057 |
| yjfM | | 4417067 | 4417705 |
| yjfC | | 4417708 | 4418871 |
| aidB | | 4418955 | 4420580 |
| yjfN | Complementary | 4420697 | 4420972 |
| | strand | | |
| yjfO | Complementary | 4421121 | 4421450 |
| | strand | | |
| yjfP | | 4421632 | 4422381 |
| ulaR | Complementary | 4422378 | 4423133 |
| | strand | | |
| ulaG | Complementary | 4423241 | 4424305 |
| | strand | | |
| ulaA | | 4424660 | 4426057 |
| ulaB | | 4426073 | 4426378 |
| ulaC | | 4426388 | 4426852 |
| ulaD | | 4426866 | 4427516 |
| ulaE | | 4427526 | 4428380 |
| ulaF | | 4428380 | 4429066 |
| yjfY | Complementary | 4429196 | 4429471 |
| | strand | | |
| rpsF | | 4429798 | 4430193 |
| priB | | 4430200 | 4430514 |
| rpsR | | 4430519 | 4430746 |
| rplI | | 4430788 | 4431237 |
| yjfZ | Complementary | 4431308 | 4432102 |
| | strand | | |
| ytfA | | 4432449 | 4432775 |
| ytfB | Complementary | 4432759 | 4433397 |
| | strand | | |
| fklB | | 4433615 | 4434235 |
| cycA | | 4434544 | 4435956 |
| ytfE | Complementary | 4436001 | 4436663 |
| | strand | | |
| ytfF | Complementary | 4436771 | 4437745 |
| | strand | | |
| ytfG | Complementary | 4437844 | 4438704 |
| | strand | | |
| ytfH | | 4438793 | 4439173 |
| cpdB | Complementary | 4439302 | 4441245 |
| | strand | | |
| cysQ | | 4441435 | 4442175 |
| ytfI | | 4442387 | 4443325 |
| ytfJ | Complementary | 4443388 | 4443942 |
| | strand | | |
| ytfK | | 4444267 | 4444473 |
| ytfL | Complementary | 4444552 | 4445895 |
| | strand | | |
| msrA | Complementary | 4446218 | 4446856 |
| | strand | | |
| ytfM | | 4447062 | 4448795 |
| ytfN | | 4448792 | 4452571 |
| ytfP | | 4452574 | 4452915 |
| yzfA | Complementary | 4452656 | 4452925 |
| | strand | | |
| chpS | | 4453127 | 4453378 |
| chpB | | 4453372 | 4453722 |
| ppa | Complementary | 4453802 | 4454332 |
| | strand | | |
| ytfQ | | 4454642 | 4455598 |
| ytfR | | 4455738 | 4457240 |
| ytfT | | 4457254 | 4458276 |
| yjfF | | 4458263 | 4459258 |
| fbp | Complementary | 4459291 | 4460289 |
| | strand | | |
| mpl | | 4460465 | 4461838 |
| yjgA | Complementary | 4461994 | 4462545 |
| | strand | | |
| pmbA | | 4462639 | 4463991 |
| cybC | | 4464233 | 4464535 |
| nrdG | Complementary | 4464580 | 4465044 |
| | strand | | |
| nrdD | Complementary | 4465202 | 4467340 |
| | strand | | |
| treC | Complementary | 4467734 | 4469389 |
| | strand | | |
| treB | Complementary | 4469439 | 4470860 |
| | strand | | |
| treR | Complementary | 4470979 | 4471926 |
| | strand | | |
| mgtA | | 4472305 | 4475001 |
| yjgF | Complementary | 4475207 | 4475593 |
| | strand | | |
| pyrI | Complementary | 4475666 | 4476127 |
| | strand | | |
| pyrB | Complementary | 4476140 | 4477075 |
| | strand | | |
| pyrL | Complementary | 4477079 | 4477213 |
| | strand | | |
| yjgH | Complementary | 4477494 | 4477889 |
| | strand | | |
| yjgI | Complementary | 4478020 | 4478733 |
| | strand | | |
| yjgJ | | 4478804 | 4479397 |
| yjgK | | 4479542 | 4479994 |
| yjgL | | 4480117 | 4481931 |
| argI | Complementary | 4481987 | 4482991 |
| | strand | | |
| yjgD | | 4483153 | 4483569 |
| yjgM | Complementary | 4483714 | 4484217 |
| | strand | | |
| yjgN | | 4484410 | 4485606 |
| valS | Complementary | 4485662 | 4488517 |
| | strand | | |
| holC | Complementary | 4488517 | 4488960 |
| | strand | | |
| pepA | Complementary | 4489120 | 4490631 |
| | strand | | |
| yjgP | | 4490898 | 4491998 |
| yjgQ | | 4491998 | 4493080 |
| yjgR | Complementary | 4493241 | 4494743 |
| | strand | | |
| idnR | Complementary | 4494821 | 4495819 |
| | strand | | |
| idnT | Complementary | 4495886 | 4497205 |
| | strand | | |
| idnO | Complementary | 4497267 | 4498031 |
| | strand | | |
| idnD | Complementary | 4498055 | 4499086 |
| | strand | | |
| idnK | | 4499303 | 4499866 |
| yjgB | Complementary | 4499870 | 4500889 |
| | strand | | |
| leuX | | 4501085 | 4501169 |
| infB | | 4501430 | 4502620 |
| insC-6 | | 4502907 | 4503317 |
| insD-6 | | 4503275 | 4504180 |
| yjgW | | 4504279 | 4504614 |
| yjgX_3 | Complementary | 4504357 | 4504599 |
| | strand | | |
| yjgX_2 | Complementary | 4504723 | 4505169 |
| | strand | | |
| yjgX_1 | Complementary | 4505112 | 4505471 |
| | strand | | |
| yjgZ | | 4505940 | 4506269 |
| insG | Complementary | 4506783 | 4508111 |
| | strand | | |
| yjhB | | 4508738 | 4509955 |
| yjhC | | 4509967 | 4511085 |
| yjhD | Complementary | 4511306 | 4511536 |
| | strand | | |
| yjhE | | 4511541 | 4511789 |
| insN-2 | | 4511877 | 4512143 |
| insI-3 | Complementary | 4512146 | 4513297 |
| | strand | | |
| insM | Complementary | 4513254 | 4513622 |
| | strand | | |
| insO-2 | | 4513638 | 4514234 |
| yjhW | | 4514231 | 4514473 |
| yjhV | | 4514400 | 4514813 |
| fecE | Complementary | 4515370 | 4516137 |
| | strand | | |
| fecD | Complementary | 4516138 | 4517094 |
| | strand | | |
| fecC | Complementary | 4517091 | 4518089 |
| | strand | | |
| fecB | Complementary | 4518086 | 4518988 |
| | strand | | |
| fecA | Complementary | 4519033 | 4521357 |
| | strand | | |
| fecR | Complementary | 4521444 | 4522397 |
| | strand | | |
| fecI | Complementary | 4522394 | 4522915 |
| | strand | | |
| insA-7 | | 4523207 | 4523482 |
| insB-7_1 | | 4523401 | 4523694 |
| insB-7_2 | | 4523695 | 4523904 |
| yjhU | Complementary | 4524018 | 4525004 |
| | strand | | |
| yjhF | Complementary | 4525351 | 4526700 |
| | strand | | |
| yjhG | Complementary | 4526807 | 4528774 |
| | strand | | |
| yjhH | Complementary | 4528785 | 4529690 |
| | strand | | |
| yjhI | Complementary | 4529695 | 4530483 |
| | strand | | |
| sgcR | Complementary | 4530786 | 4531568 |
| | strand | | |
| sgcE | Complementary | 4531585 | 4532217 |
| | strand | | |
| sgcA | Complementary | 4532779 | 4532660 |
| | strand | | |
| sgcQ | Complementary | 4532791 | 4533597 |
| | strand | | |
| sgcC | Complementary | 4533610 | 4534923 |
| | strand | | |
| sgcB | Complementary | 4534935 | 4535213 |
| | strand | | |
| sgcX | Complementary | 4535210 | 4536331 |
| | strand | | |
| yjhP | Complementary | 4537117 | 4537863 |
| | strand | | |
| yjhQ | Complementary | 4537919 | 4538464 |
| | strand | | |
| yjhX | Complementary | 4538476 | 4538733 |
| | strand | | |
| yjhR | | 4539695 | 4540711 |
| yjhS | Complementary | 4541294 | 4542274 |
| | strand | | |
| yjhT | Complementary | 4542339 | 4543445 |
| | strand | | |
| yjhA | Complementary | 4543465 | 4544181 |
| | strand | | |
| fimB | | 4545637 | 4546239 |
| fimE | | 4546717 | 4547313 |
| fimA | | 4547795 | 4548343 |
| fimI | | 4548408 | 4548947 |
| fimC | | 4548984 | 4549709 |
| fimD | | 4549776 | 4552412 |
| fimF | | 4552422 | 4552952 |
| fimG | | 4552965 | 4553468 |
| fimH | | 4553488 | 4554390 |
| gntP | Complementary | 4554633 | 4555976 |
| | strand | | |
| uxuA | | 4556316 | 4557500 |
| uxuB | | 4557581 | 4550041 |
| uxuR | | 4559256 | 4560029 |
| yjiC | Complementary | 4560170 | 4561000 |
| | strand | | |
| yjiD | | 4561673 | 4562065 |
| yjiE | Complementary | 4562058 | 4562969 |
| | strand | | |
| iadA | Complementary | 4563034 | 4564206 |
| | strand | | |
| yjiG | Complementary | 4564219 | 4564680 |
| | strand | | |
| yjiH | Complementary | 4564677 | 4565360 |
| | strand | | |
| kptA | | 4565610 | 4566164 |
| yjiJ | Complementary | 4566177 | 4567355 |
| | strand | | |
| yjiK | Complementary | 4567423 | 4568391 |
| | strand | | |
| yjiL | Complementary | 4568602 | 4569369 |
| | strand | | |
| yjiM | Complementary | 4569379 | 4570530 |
| | strand | | |
| yjiN | Complementary | 4570646 | 4571926 |
| | strand | | |
| yjiO | Complementary | 4571967 | 4573199 |
| | strand | | |
| yjiP | | 4573678 | 4573989 |
| yjiQ | | 4574038 | 4574598 |
| yjiR | Complementary | 4574842 | 4576254 |
| | strand | | |
| yjiS | | 4576431 | 4576595 |
| yjiT | | 4577094 | 4578611 |
| yjiV | | 4578815 | 4581535 |
| mcrC | Complementary | 4581592 | 4582638 |
| | strand | | |
| mcrB | Complementary | 4582638 | 4584017 |
| | strand | | |
| yjiW | Complementary | 4584179 | 4584577 |
| | strand | | |
| hsdS | Complementary | 4584748 | 4586142 |
| | strand | | |
| hsdM | Complementary | 4586139 | 4587728 |
| | strand | | |
| hsdR | Complementary | 4587929 | 4591495 |
| | strand | | |
| mrr | | 4591629 | 4592543 |
| yjiA | Complementary | 4592589 | 4593545 |
| | strand | | |
| yjiX | Complementary | 4593556 | 4593759 |
| | strand | | |
| yjiY | Complementary | 4593809 | 4595959 |
| | strand | | |
| tsr | | 4596337 | 4597992 |
| yjiZ | Complementary | 4598041 | 4599402 |
| | strand | | |
| yjjM | Complementary | 4599617 | 4600531 |
| | strand | | |
| yjjN | | 4600670 | 4601692 |
| mdoB | Complementary | 4601830 | 4604121 |
| | strand | | |
| yjjA | Complementary | 4604375 | 4604869 |
| | strand | | |
| dnaC | Complementary | 4604918 | 4605655 |
| | strand | | |
| dnaT | Complementary | 4605658 | 4606197 |
| | strand | | |
| yjjB | Complementary | 4606304 | 4606630 |
| | strand | | |
| yjjP | Complementary | 4606768 | 4607538 |
| | strand | | |
| yjjQ | | 4608157 | 4608882 |
| bglJ | | 4608894 | 4609517 |
| fhuF | Complementary | 4609555 | 4610343 |
| | strand | | |
| yjjZ | | 4610484 | 4610720 |
| leuV | Complementary | 4610759 | 4610845 |
| | strand | | |
| leuP | Complementary | 4610880 | 4610966 |
| | strand | | |
| leuQ | Complementary | 4610995 | 4611081 |
| | strand | | |
| rsmC | Complementary | 4611349 | 4612380 |
| | strand | | |
| holD | | 4612483 | 4612896 |
| rimI | | 4612865 | 4613311 |
| yjjG | | 4613326 | 4614003 |
| prfC | | 4614094 | 4615683 |
| osmY | | 4616076 | 4616681 |
| ytjA | | 4616790 | 4616969 |
| yjjU | | 4617091 | 4618164 |
| yjjV | | 4618161 | 4618940 |
| yjjW | Complementary | 4619360 | 4620223 |
| | strand | | |
| yjjI | Complementary | 4620195 | 4621745 |
| | strand | | |
| deoC | | 4622003 | 4622782 |
| deoA | | 4622909 | 4624231 |
| deoB | | 4624283 | 4625506 |
| deoD | | 4625563 | 4626282 |
| yjjJ | | 4626449 | 4627780 |
| lplA | Complementary | 4627781 | 4628797 |
| | strand | | |
| ytjB | Complementary | 4628825 | 4629469 |
| | strand | | |
| serB | | 4629575 | 4630543 |
| radA | | 4630592 | 4631974 |
| nadR | | 4631995 | 4633227 |
| yjjK | Complementary | 4633535 | 4635202 |
| | strand | | |
| slt | | 4635413 | 4637350 |
| trpR | | 4637440 | 4637766 |
| yjjX | Complementary | 4637913 | 4638425 |
| | strand | | |
| ytjC | | 4638477 | 4639124 |
| rob | Complementary | 4639121 | 4639990 |
| | strand | | |
| creA | | 4640201 | 4640674 |
| creB | | 4640687 | 4641376 |
| creC | | 4641376 | 4642800 |
| creD | | 4642858 | 4644210 |
| arcA | Complementary | 4644270 | 4644986 |
| | strand | | |
| yjjY | | 4645082 | 4645222 |
| yjtD | | 4645622 | 4646308 |

[0257] In addition, (23) an E. coli mutant strain having a chromosomal DNA comprising the genes [1] or homologous gene thereof of (1), and not more than 10% of the genes [2] of (1) and the genes [3] below or homologous gene thereof, [3] chpA gene, uspG gene, ybdR gene, rnk gene, rna gene, citT gene, citG gene, citX gene, citF gene, citE gene, citD gene, citC gene, citA gene, citB gene, dcuC gene, crcA gene, cspE gene, crcB gene, ybeH gene, ybeM gene, yqcA gene, yqcB gene, yqcC gene, syd gene, yqcD gene, ygdH gene, sdaC gene, sdaB gene, exo gene, fucO gene, fucA gene, fucP gene, fucI gene, fucK gene, fucU gene, fucR gene, ygdE gene, ygdD gene, gcvA gene, ygdI gene, csdA gene, ygdK gene, araD gene, araA gene, araB gene, araC gene, yabI gene, thiQ gene, thiP gene, tbpA gene, sgrR gene, setA gene, yhfZ gene, yhfY gene, yhfX gene, yhfW gene, php gene, yhfU gene, yhfT gene, yhfS gene, frlR gene, frlD gene, frlC gene, frlB gene, frlA gene, yhfL gene, pncA gene, ydjE gene, ydjF gene, ydjG gene, ydjH gene, ydjI gene, ydjJ gene, ydjK gene, ydjL gene, yeaC gene, yeaA gene, ade gene, yicO gene, yicN gene, yicM gene, yicS gene, nlpA gene, yicL gene, setC gene, ygjI gene, ygjJ gene, ygjK gene, fadH gene, ygjM gene, ygjN gene, ygjO gene, ygjP gene, ygjQ gene, ygjR gene, alx gene, sstT gene, ygjV gene, yrhB gene, yrhA gene, yhhZ gene, yhhY gene, yhhX gene, yhhW gene, yeaK gene, yoaI gene, yeaL gene, yeaM gene, yeaN gene, yeaO gene, yoaF gene, yeaP gene, yeaQ gene, yoaG gene, yeaR gene, yeaS gene, yeaT gene, yeaU gene, yeaV gene, yeaW gene, yeaX gene, hyfA gene, hyfB gene, hyfC gene, hyfD gene, hyfE gene, hyfF gene, hyfG gene, hyfH gene, hyfI gene, hyfJ gene, hyfR gene, focB gene

is also the E. coli mutant strain of the present invention.

[0258] Further, the E. coli mutant strain of the present invention includes;
[0259] (24) The E. coli mutant strain obtained via modification of the E. coli mutant strain according to any one of (1) to (23) above by a method selected from among the following [1] to [5]:
[0260] [1] a method for reducing or removing at least one mechanism to control biosynthesis of the useful substance;
[0261] [2] a method for increasing, the expression of at least one enzyme associated with biosynthesis of the useful substance;
[0262] [3] a method for increasing the copy number of at least one enzyme gene associated with biosynthesis of the useful substance;
[0263] [4] a method for attenuating or blocking at least one metabolic pathway which branches from the biosynthetic pathway of the useful substance into metabolites other than the useful substance; or
[0264] [5] a method for selecting a strain that exhibits higher resistance to an analogue of a useful substance than a wild-type E. coli strain.

[0265] The E. coli mutant strains described in (1) to (23) above appear to lack parts of or entire genes that encode proteins that are not directly involved in biosynthesis of useful substances but indirectly suppress generation of such useful substances. Such E. coli mutant strains and the mutant strain of (24) above are useful as E. coli mutant strains for producing useful substances.

[0266] The E. coli mutant strain of the present invention may be any E. coli mutant strain, provided that it belongs to Escherichia coli. It is preferably a mutant strain of the E. coli K-12 strain, the E. coli B strain, or the E. coli W strain, more preferably a mutant strain of the E. coli K-12 strain, further preferably a mutant strain of the E. coli W3110 strain (ATCC27325) or the E. coli MG1655 strain (ATCC47076), and particularly preferably the E. coli W3110 strain (ATCC27325), for example.

2. Method for Producing the E. coli Mutant Strain of the Present Invention

[0267] The E. coli mutant strain of the present invention can be obtained by any method, provided that it allows such mutant strain to be obtained. For example, the following method wherein a given gene or DNA on E. coli chromosomal DNA is deleted may be employed.

[0268] A gene or DNA on E. coli chromosomal DNA can be deleted via a method utilizing homologous recombination, for example. An example of a general method utilizing homologous recombination is a method involving the use of plasmids for homologous recombination that can be prepared by ligating DNA fragments located at both outer sides of the gene or DNA that is intended to be deleted on E. coli chromosomal DNA to plasmid DNA having a drug resistance gene that cannot be autonomously replicated in such E. coli.

[0269] After the plasmids for homologous recombination are introduced into an E. coli cell by a conventional method, transformants into which the plasmids for homologous recombination have been integrated to chromosomal DNA by homologous recombination are selected using the drug resistance as an indicator. The obtained transformants are cultured in a medium that does not contain the aforementioned drug for several hours to 1 day, thereafter the cultures are spread on an agar medium that contains the drug and to an agar medium that does not contain the drug, and strains that do not grow in the former medium but grow in the latter medium are selected. Thus, strains in which the second homologous recombination has taken place on the chromosomal DNA can be obtained. By determining the nucleotide sequence of a region of the chromosomal DNA in which the gene or DNA to be deleted was present, the introduction of deletion of the target gene or DNA on chromosomal DNA can be confirmed.

[0270] An example of a method utilizing homologous recombination, and thereby effectively introducing deletion, substitution or addition of nucleotide(s) into multiple genes, is a method involving the use of a linear DNA.

[0271] Specifically, a linear DNA that contains DNA fragments existing at both outside regions of a gene or DNA to be deleted on chromosomal DNA is incorporated into a cell to cause homologous recombination between the chromosomal DNA and the introduced linear DNA. This method can be applied to any microorganisms, provided that such Escherichia coli effectively incorporate a linear DNA. Such microorganisms include preferably Escherichia coli that expresses λ phage-derived recombinant proteins (Red recombination system).

[0272] An example of Escherichia coli that expresses the λRed recombination system is Escherichia coli JM101 possessing pKD46, which is plasmid DNA having the gene of the λ Red recombination system (available from the E. coli Genetic Stock Center, Yale University, U.S.A.).

[0273] Examples of DNAs that can be used for homologous recombination include:
[0274] (a) a linear DNA having, at both ends of the drug resistance gene, DNA existing at both outside regions of a chromosomal DNA into which the introduction of deletion, substitution or addition of nucleotide(s) is intended, or DNA homologous thereto;
[0275] (b) a linear DNA to which DNA existing at both outside regions of a chromosomal DNA into which the introduction of deletion, substitution or addition of nucleotide(s) is intended, or DNA homologous thereto is directly ligated;
[0276] (c) a linear DNA having, at both ends of DNA in which a drug resistance gene and a gene that can be used for negative selection are ligated, DNA existing at both outside regions of chromosomal DNA into which the introduction of deletion, substitution or addition of nucleotide(s) is intended, or DNA homologous thereto; and
[0277] (d) a linear DNA according to (a) above, further having a nucleotide sequence which is recognized by yeast-derived Flp recombinase [Proc. Natl. Acad. Sci., U.S.A., 82, 5875, 1985] between a drug resistance gene and DNA existing at both outside regions of a chromosomal DNA or DNA homologous thereto.

[0278] Any drug resistance genes can be used, provided that such genes impart drug resistance to a drug to which E. coli shows sensitivity. For example, the drug resistance genes include kanamycin resistance genes, chloramphenicol resistance genes, gentamicin resistance genes, spectinomycin resistance genes, tetracycline resistance genes, ampicillin resistance genes, and the like.

[0279] The genes that can be used for negative selection are genes that are lethal to E. coli under given culture conditions, when such genes are expressed in E. coli. Examples of such genes include sacB genes derived from the microorganism which belongs to the genus Bacillus [Appl. Environ. Microbiol., 59, 1361-1366, 1993] and rpsL genes derived from the microorganism which belongs to the genus Escherichia [Genomics, 72, 99-104, 2001].

[0280] DNA that exists at both ends of the aforementioned linear DNA which is located at both outside regions of a chromosomal DNA into which introduction of substitution or deletion of nucleotide(s) is intended, or DNA homologous thereto, is oriented on the linear DNA in the same direction as the direction thereof on the chromosomal DNA. The length thereof is preferably about 10 bp to 100 bp, more preferably about 20 bp to 50 bp, and further preferably about 30 bp to 40 bp.

[0281] The nucleotide sequence that is recognized by yeast-derived Flp recombinase may be a nucleotide sequence that is recognized by yeast-derived Flp recombinase and has a nucleotide sequence which catalyze homologous recombination, provided that the aforementioned protein recognizes such nucleotide sequence and catalyzes homologous recombination of such nucleotide sequence.

[0282] A DNA homologous thereto refers to a DNA which has identity to the extent that homologous recombination takes place between the aforementioned linear DNA and a target region on a chromosomal DNA. Specifically, it refers to DNA having 80% or more, preferably 90% or more, more preferably 95% or more, and further preferably 100% homology.

[0283] Homology of the nucleotide sequences can be determined using the aforementioned programs such as BLAST or FASTA.

[0284] The aforementioned linear DNA fragment can be prepared by PCR. Also, DNA containing the linear DNA can be constructed on a plasmid and the linear DNA of interest can then be obtained by restriction enzyme treatment.

[0285] Deletion, substitution, or addition of nucleotide(s) can be introduced into chromosomal DNAs of E. coli by any of the following methods 1 to 4:
[0286] Method 1: a method wherein the linear DNA of (a) or (d) above is introduced into a host microorganism, and a transformant, into which such linear DNA has been integrated into a chromosomal DNA by homologous recombination, is selected using drug resistance as an indicator;
[0287] Method 2: a method to substitute or delete a region on a chromosomal DNA of a microorganism by introducing a DNA wherein DNAs existing at both outside regions of a chromosomal DNA into which the introduction of deletion, substitution or addition of nucleotide(s) is intended, or DNAs homologous thereto are directly ligated into the transformant obtained by the above method 1, and deleting the drug resistance gene integrated into chromosomal DNA by the method;

### Method 3:

[0288] [1] introducing the linear DNA of (c) above into a host microorganism and selecting a transformant wherein the linear DNA has been integrated into chromosomal DNA by homologous recombination using drug resistance as an indicator,
[0289] [2] synthesizing a DNA obtained by ligating DNAs homologous to DNAs located at both outside regions of a target region of substitution or deletion on a chromosomal DNA in the same direction as that on the chromosomal DNA and introducing the synthesized product into the transformant obtained in [1] above, and
[0290] [3] culturing transformants subjected to the procedure of [2] above under conditions where the genes that can be used for negative selection are expressed, and selecting strains that can grow in the culture condition as strains in which the drug resistance genes and genes that can be used for negative selection have been deleted from the chromosomal DNA; and

### Method 4:

[0291] [1] introducing the linear DNA of (d) above into a host microorganism and selecting a transformant wherein the linear DNA has been integrated into chromosomal DNA by homologous recombination using drug resistance as an indicator, and [2] introducing Flp recombinase gene-expression plasmid into the transformant obtained in the above [1] to express the Flp recombinase gene, and obtaining strains sensitive to the drug used in the above[1].

[0292] A method of introducing a linear DNA into a host microorganism that is employed in the above methods can be any method as long as the DNA can be introduced into the microorganism. Examples thereof include a method involving the use of calcium ions [Proc. Natl. Acad. Sci., U.S.A., 69, 2110, 1972], the protoplast method [Japanese Published Unexamined Patent Application No. 2483942/88 (1988)], and electroporation [Nucleic Acids Res., 16, 6127, 1988].

[0293] By using the DNA comprising at a site around the center thereof any gene to be inserted into a chromosomal DNA as the DNA that is used in method 2 or method 3 [2], drug resistance genes or the like can be deleted, and at the same time, any genes can be introduced into the chromosomal DNA.

[0294] According to the methods 2 to 4 above, foreign genes, such as drug resistance genes and genes that can be used for negative selection, do not remain in the chromosomal DNA of the transformant which is finally obtained. With the utilization of such methods, accordingly, the procedures of Method 2, Methods 3 [1] to [3] or method 4 [1] [2] can be repeated by using the same drug resistance genes and genes that can be used for negative selection. This enables the easy production of E. coli having deletion of gene or DNA at two or more different regions on a chromosomal DNA.

[0295] The amounts of cells of the E. coli mutant strains obtained by such method are greater than those of wild-type E. coli strains after a given period of culture. This can be confirmed by, for example, culturing the wild-type parental E. coli strains and the mutant strains using M9 minimal medium that is composed of 1% glucose, 0.6% disodium phosphate, 0.3% potassium dihydrogenphosphate, 0.05% sodium chloride, 0.1% ammonium chloride, 2 mmol/l of magnesium sulfate heptahydrate, 10 mg/l of iron sulfate and 100 μmol/l of calcium chloride, and assaying absorption of culture products at 660 nm at a given frequency, or assaying an ATP content per unit of medium via a conventional technique.

[0296] Also, the E. coli mutant strain of the present invention can be produced by a method wherein a gene or DNA on chromosomal. DNA of E. coli capable of producing a useful substance is deleted or a method wherein the capacity for producing a useful substance is imparted to E. coli from which a gene or DNA on chromosomal DNA has been deleted.

[0297] E. coli capable of producing a useful substance may be any E. coli, provided that it is capable of producing one or more types of useful substances. Examples of such E. coli include a strain isolated from nature that is capable of producing a useful substance, and E. coli to which the ability to produce a desirable useful substance has been artificially imparted by known methods.

[0298] Examples of such known methods include:
[0299] (a) a method for reducing or removing at least one mechanism for regulating biosynthesis of a useful substance;
[0300] (b) a method for increasing the expression level of at least one enzyme associated with biosynthesis of a useful substance;
[0301] (c) a method for increasing the copy number of at least one enzyme gene associated with biosynthesis of a useful substance;
[0302] (d) a method for attenuating or blocking at least one metabolic pathway which branches from a biosynthetic pathway of a useful substance into metabolites other than the useful substance; and
[0303] (e) a method for selecting a strain that exhibits higher resistance to an analogue of a useful substance than a wild-type strain. Such conventional methods can be used alone or in combinations.

[0304] When useful substances are amino acids in the specific methods (a) to (e) above, for example, method (a) is described in Agric. Biol. Chem., 43, 105-111, 1979, J. Bacteriol., 110, 761-763, 1972, and Appl. Microbiol. Biotechnol., 39, 318-323, 1993; method (b) is described in Agric. Biol. Chem., 43, 105-111, 1979 and J. Bacteriol., 110, 761-763, 1972; method (c) is described in Appl. Microbiol. Biotechnol., 39, 318-323, 1993 and Agric. Biol. Chem., 39, 371-377, 1987; method (d) is described in Appl. Environ. Microbiol., 38, 181-190, 1979 and Agric. Biol. Chem., 42, 1773-1778, 1978; and method (e) is described in Agric. Biol. Chem., 36, 1675-1684, 1972, Agric. Biol. Chem., 41, 109-116, 1977, Agric. Biol. Chem., 37, 2013-2023, 1973, and Agric. Biol. Chem., 51, 2089-2094, 1987. With reference to these literatures, microorganisms capable of forming and accumulating various amino acids can be produced.

[0305] Also, many examples of a method for producing microorganisms capable of forming and accumulating amino acids by any of or two or more of methods (a) to (e) above or a combination thereof are described in Biotechnology 2nd ed., vol. 6, Products of Primary Metabolism (VCH Verlagsgesellschaft mbH, Weinheim, 1996), section 14a or 14b, Advances in Biochemical Engineering/Biotechnology 79, 1-35, 2003, or Amino san Hakko (Amino acid fermentation), Japan Scientific Societies Press, Hiroshi Aida et al. (1986). In addition, many reports have been made concerning a specific method for producing microorganisms capable of forming and accumulating amino acids. Examples thereof include Japanese Published Unexamined Patent Application No. 2003-164297, Agric. Biol. Chem., 39, 153-160, 1975, Agric. Biol. Chem., 39, 1149-1153, 1975, Japanese Published Unexamined Patent Application No. 13599/83(1983), J. Gen. Appl. Microbiol., 4, 272-283, 1958, Japanese Published Unexamined Patent Application No. 94985/88(1988), Agric. Biol. Chem., 37, 2013-2023, 1973, WO 97/15673, Japanese Published Unexamined Patent Application No. 18596/81(1981), Japanese Published Unexamined Patent Application No. 144092/81(1981), and Japanese Published Unexamined Patent Application No. 2003-511086. With reference to these literatures, E. coli mutants capable of producing one or more kinds of amino acids can be produced. Also, E. coli capable of producing other useful substance can be produced by reinforcement of enzymes for biosynthesis of said useful substance, and modification of biosynthesis regulatory mechanism, excretion mechanism and the like in the same way as in the production of E. coli mutant strain capable of producing an amino acid.

### 3. Method for Producing Useful Substances of the Present Invention

[0306] The present invention relates to a method for producing useful substances characterized by culturing the E. coli mutant strain of the present invention in a medium so as to form and accumulate such useful substances in the culture and recovering the useful substances from the culture.

[0307] Useful substances are not particularly limited, provided that such substances can be produced with the use of the E. coli mutant strain of the present invention. Examples thereof include proteins, amino acids, nucleic acids, vitamins, saccharides, organic acids, and lipids. Examples of proteins include inosine kinase, glutamate 5-kinase (EC 2.7.2.11), glutamate-5-semialdehyde dehydrogenase (EC 1.2.1.41), pyrroline-5-carboxylate reductase (EC 1.5.1.2), and human granulocyte-colony-stimulating factors. An example of peptide is glutathione. Examples of amino acids include L-alanine, glycine, L-glutamine, L-glutamic acid, L-asparagine, L-aspartic acid, L-lysine, L-methionine, L-threonine, L-leucine, L-valine, L-isoleucine, L-proline, L-histidine, L-arginine, L-tyrosine, L-tryptophane, L-phenylalanine, L-serine, L-cysteine, L-3-hydroxyproline, and L-4-hydroxyproline. Examples of nucleic acids include adenosine triphosphate, inosine, guanosine, inosinic acid, and guanylic acid. Examples of vitamins include riboflavin, thiamine, and ascorbic acid. Examples of saccharides include xylose and xylitol. Examples of lipids include eicosapentaenoic acid (EPA) and docosahexaenoic acid (DHA).

[0308] The method of producing a useful substance of the present invention also includes a method of producing a useful substance using an enzyme reaction requiring ATP, which comprises using the E. coli mutant strain of the present invention to produce an enzyme protein catalyzing the enzyme reaction and supplying, from the E. coli mutant strain of the present invention, ATP necessary for maintaining progress of the reaction catalyzed by the enzyme protein.

[0309] The E. coli mutant strain that is used for the production method of the present invention can be cultured in accordance with a conventional method as described below.

[0310] A medium for culturing E. coli mutant strain which is used for the production method of the present invention may be natural or synthetic medium as long as it contains carbon sources, nitrogen sources, inorganic salts, etc. assimilable by the microorganisms and the microorganisms can be efficiently cultured therein.

[0311] Any carbon sources assimilable by the microorganisms can be used. As carbon sources, carbohydrates such as glucose, fructose, sucrose, molasses containing any of such substances, starch, and starch hydrolysate; organic acids such as acetic acid and propionic acid; and alcohols such as ethanol and propanol, and the like can be used.

[0312] As nitrogen sources, ammonia, ammonium salts of inorganic or organic acids such as ammonium chloride, ammonium sulfate, ammonium acetate, and ammonium phosphate, peptone, meat extract, yeast extract, corn steep liquor, casein hydrolysate, soybean cake and hydrolysate of soybean cake, and various fermentation microorganisms and digests thereof, and the like can be used.

[0313] As inorganic salts, monopotassium phosphate, dipotassium phosphate, magnesium phosphate, magnesium sulfate, sodium chloride, iron(I) sulfate, manganese sulfate, copper sulfate, and calcium carbonate, and the like can be used.

[0314] Culturing is carried out under aerobic conditions such as shaking culture or submerged aeration agitation culture. Culturing temperature is preferably 15 to 40° C., and culture time is generally 16 hours to 7 days. During culturing, the pH is preferably maintained at 3.0 to 9.0. The pH is adjusted with an inorganic or organic acid, an alkali solution, urea, calcium carbonate, ammonia, or the like.

[0315] When useful substances are formed and accumulated extracellularly, precipitates such as cells are removed from the culture after the completion of culturing, and target useful substances can be isolated and purified from the culture via combined use of ion-exchange treatment, concentration, salting out, and other means.

[0316] When useful substances are formed and accumulated intracellularly, cells are recovered from the culture after the completion of culturing and then disrupted via adequate means such as mechanical or chemical means. Target useful substances can be isolated and purified from the solution of disrupted cells via combined use of ion-exchange treatment, concentration, salting out, and other means.

### EXAMPLE 1

### (1) Production Method of Reduced-Genome Strain

[0317] According to the chromosome processing methods described in JP-A-2004-166576 and WO2006/57341, namely, a method using sacB gene encoding levansucrase derived from Bucillus subtilis, reduced-genome strains S1-S10 strains defective in the regions containing the genes shown in the following Table 2 on the chromosome of the Escherichia coli W3110 strain were prepared from the Step28 strain (WO2006/57341) defective in the 1026.7 kbp region on the chromosome of W3110red strain (WO2006/57341), which is a strain wherein the recombination system of Escherichia coli K-12 lineage strain W3110 strain has been replaced by a Red recombination system derived from λ phage. According to the method, primer DNAs are designed based on the nucleotide sequences on both ends of the region desired to be defective on the chromosomal DNA and, using these primer DNAs and chromosomal DNA as a template, PCR reaction is performed to amplify DNA fragment, using which any region on the chromosomal DNA can be eliminated.

### (2) Growth Test

[0318] Then, the growth was compared among the W3110red strain, reduced-genome strain S28 strain (WO2006/57341) and S1-S10 strains. The gene group wherein step28 strain is defective on the chromosomal DNA is shown in Table 2.

TABLE 2

| Strain name | Deleted gene |
|---|---|
| W3110red | None |
| Step 28 | [A] fhuA, fhuC, fhuD, fhuB, yafJ, yafK, yafQ, dinJ, yafL, yafM, |
| strain | fhiA, mbhA, dinB, yafN, yafO, yafP, ykfJ, prfH, yagP, yagQ, yagR, |
| | yagS, yagT, yagU, ykgJ, yagV, yagW, yagX, yagY, yagZ, ykgK, ykgL, |
| | ykgM(JW5034), ykgM(JW5035), eaeH, ykgA, ykgB, ykgI, ykgC, ykgD, |
| | ykgE, ykgF, ykgG, ykgH, betA, betB, betI, betT, yahA, yahB, yahC, |
| | yahD, yahE, yahF, yahG, yahH, yahI, yahJ, yahK, yahL, yahM, yahN, |
| | yahO, prpR, prpB, prpC, prpD, prpE, codB, codA, cynR, cynT, cynS, |
| | cynX, lacA, lacY, lacZ, lacI, mhpR, mhpA, mhpB, mhpC, mhpD, |
| | mhpF, mhpE, mhpT, yaiL, frmB, frmA, frmR, yaiO, yaiX, yaiF, yaiP, |
| | yaiS, tauA, tauB, tauC, tauD, yaiT, yaiU, yaiV, ampH, sbmA, yaiW, |
| | yaiY, yaiZ, ddlA, yaiB, phoA, psiF, yaiC, ybbO, tesA, ybbA, ybbP, |
| | ylbG, ybbB, ybbS, allA, allR, glxR, ybbV, ybbW, allB, ybbY, glxK, |
| | ylbA, allC, allD, fdrA, ylbE_1, ylbE_2, ylbF, ybcF, envY, ybcH, nfrA, |
| | nfrB, cusS, cusR, cusC, cusF, cusB, cusA, pheP, ybdG, nfnB, ybdF, |
| | ybdJ, ybdK, hokE, ybeL, ybeQ, ybeR, djlB, ybeT, ybeU, djlC, hscC, |
| | rihA, gltL, gltK, gltJ, gltI, kdpF, ybfA, ybgA, phr, ybiA, dinG, ybiB, |
| | ybiC, ybiJ, ybiI, ybiX, fiu, ybiM, ybiN, ybiO, glnQ, glnP, glnH, yliA, |
| | yliB, yliC, yliD, yliE, yliF, yliG, yliH, yliI, yliJ, dacC, deoR, ybjG, |
| | ybjC, nfsA, rimK, ybjN, potF, potG, potH, potI, ybjO, rumB, artJ, |
| | artM, artQ, artI, artP, ybjP, ybjQ, ybjR, ybjS, ybjT, ltaE, ymcC, |
| | ymcD, cspH, cspG, ymcE, gnsA, yccM, torS, torT, torR, torC, torA, |
| | torD, cbpM, cbpA, yccE, agp, yccJ, wrbA, ymdF, ycdG, ycdH, ycdI, |
| | rarA, ycdK, ycdL, ycdM, ycdC, putA, putP, ycdN_1, ycdN_2, ycdO, |
| | ycdB, phoH, ycdP, ycdQ, ycdR, ycdS, ycdT, ymdE, ycdU, elbA, ycgX, |
| | ycgE, ycgF, ycgZ, ymgA, ymgB, ymgC, ycgG, ymgF, ycgH_1, ycgH_2, |
| | ymgD, ymgG, ymgH, ycgI, ydfH, ydfZ, ydfI, ydfJ, yecT, flhE, flhA, |
| | flhB, cheZ, cheY, cheB, cheR, tap, tar, cheW, cheA, motB, motA, |
| | flhC, flhD, yecG, otsA, otsB, araH, araG, araF, yecI, yecJ, isrB, |
| | yecR, ftn, yecH, tyrP, uvrC, uvrY, yecF, sdiA, yecC, yecS, yedO, |
| | fliY, fliZ, fliA, fliC, fliD, fliS, fliT, amyA, yedD, yedE, yedF, yedK, |
| Step 28 | yedL, yedN_2, yedN_1, yedM, intG, fliE, fliF, fliG, fliH, fliI, fliJ, |
| strain | fliK, fliL, fliM, fliN, fliO, fliP, fliQ, fliR, rcsA, dsrB, yodD, yedA, |
| (continued) | vsr, dcm, yedJ, yedR, yedS_1, yedS_2, yedS_3, hchA, yedV, yedW, |
| | yedX, yedY, yedZ, yodA, wbbL_2, wbbL_1, wbbK, wbbJ, wbbI, wbbH, |
| | glf, rfbX, rfbC, rfbA, rfbD, rfbB, yegE, alkA, yegD, yegI, yegJ, yegK, |
| | yegL, ryeC, ryeD, mdtA, mdtB, mdtC, mdtD, baeS, baeR, yegP, yegQ, |
| | ryeE, ogrK, yegZ, yegR, yegS, gatR_1, gatR_2, gatD, gatC, gatB, |
| | gatA, gatZ, gatY, fbaB, yegT, yegU, yegV, yegW, yegX, molR_1, |
| | molR_2, molR_3, yehI, yehK, yehL, yehM, yehP, yehQ, yehR, yehS, |
| | yehT, yehU, mlrA, yohO, yehW, yehX, yehY, yehZ, bglX, dld, pbpG, |
| | yohC, yeiI, yeiJ, rihB, yeiL, yeiM, yeiN, yeiC, elaB, elaA, elaC, elaD, |
| | yfbK, yfbL, yfbM, yfbN, yfbO, yfbP, yfcC, yfcD, yfcE, yfcF, yfcG, |
| | folX, yfcH, yfcI, hisP, hisM, hisQ, hisJ, argT, ypdA, ypdB, ypdC, |
| | ypdD, ypdE, ypdF, ypdG, ypdH, pinH, ypjB, ypjC, ileY, ygaQ, ygaR, |
| | yqaC, yqaD, ygaT, csiR, ygaU, yqaE, ygaV, ygaP, stpA, ygaW, ygaC, |
| | ygaM, nrdH, nrdI, nrdE, proV, proW, proX, ygaX, ygaY, ygaZ, ygaH, |
| | srlA, srlE, srlB, srlD, gutM, srlR, gutQ, yqeG, yqeH, yqeI, yqeJ, |
| | yqeK, ygeF, ygeG, ygeH, ygeI, pbl, ygeK, ygeL, ygeM, ygeN, ygeO, |
| | ygeP, ygeQ, glyU, ygeR, xdhA, xdhB, xdhC, ygeV, ygeW, ygeX, ygeY, |
| | hyuA, yqeA, yqeB, yqeC, ygfJ, ygfK, ssnA, ygfM, xdhD, ygfO, guaD, |
| | ygfQ, ygfS, ygfT, ygfU, idi, emtA, emtB, yghD, yghE, yghF, yghG, |
| | pppA, yghJ, yghK, glcB, glcG, glcF, glcE, glcD, glcC, yghO, yghQ, |
| | yghR, yghS, yghT, ygiS, ygiT, ygiU, ygiV, ygiW, qseB, qseC, ygiZ, |
| | mdaB, ygiN, gltF, yhcA, yhcD, yhcE, yhcF, yhcG, yhcH, nanK, nanE, |
| | yhdJ, yhdU, envR, acrE, acrF, yhdV, yhdW, yhdX, yhdY, yijP, yijO, |
| | frwD, pflC, pflD, frwB, frwC, ptsA, rhaT, rhaR, rhaS, rhaB, rhaA, |
| | rhaD, yiiL, frvA, frvB, frvX, frvR, yiiG, yiiF, yiiE, yiiD, dtd, rbn, |
| | yihX, yihW, yihV, yihU, yihT, yihS, yihR, yihQ, yihP, yihO, ompL, |
| | yihN, yihM, yihL, hsrA, rbsR, rbsK, rbsB, rbsC, rbsA, rbsD, trkD, |
| | yieN, yieM, asnA, yidB, yidA, yidX, dgoR, dgoK, dgoA, dgoD, dgoT, |
| | cbrA, yidR, yidQ, yidE, yidP, glvC, glvB, glvG, ysdC, yidL, yidK, |
| Step 28 | yidJ, yidI, yidH, yidG, yidF, yhiN, yhiM, yhiL, yhiK, yhiJ, yhiI, |
| strain | rbbA, yhhJ, chiA, bfd, bfr, gspO, gspM, gspL, gspK, gspJ, gspI, gspH, |
| (continued) | gspG, gspF, gspE, gspD, gspC, gspA, pioO, yjbE, yjbF, yjbG, yjbH, |
| | yjbA, xylE, malG, malF, malE, malK, lamB, malM, yjbI, yjcP, yjcQ, |
| | yjcR, yjcS, alsK, alsE, alsC, alsA, alsB, yjdP, phnP, phnO, phnN, |
| | phnM, phnL, phnK, phnJ, phnI, phnH, phnG, phnF, phnE(JW4064), |
| | phnE(JW4065), phnD, phnC, phnB, phnA, yjdA, yjcZ, yjfI, yjfJ, yjfK, |
| | yjfL, yjfM, yjfC, aidB, yjfN, yjfO, yjfP, ulaR, ulaG, ulaA, ulaB, ulaC, |
| | ulaD, ulaE, yjhS, yjhT, yjhA, fimB, fimE, fimA, fimI, fimC, fimD, |
| | fimF, fimG, fimH, gntP, uxuA, uxuB, uxuR, yjiC, yjiD, yjiE, iadA, |
| | yjiG, yjiH, kptA, yjiJ, yjiK, yjiL, yjiM, yjiN, yjiO, yjiP, yjiQ, yjiR, |
| | yjiS, yjiT, yjiV, mcrC, mcrB, yjiW, hsdS, hsdM, hsdR, mrr, yjiA, |
| | yjiX, yjiY, tsr, yjiZ, yjjM, yjjN, mdoB, yjjA |
| | [B] chpA. |
| S1 strain | Gene groups deleted in Step 28 strain, uspG, ybdR, rnk, rna, citT, citG, citX, |
| | citF, citE, citD, citC, citA, citB, dcuC, crcA, cspE, crcB, ybeH and |
| | ybeM. |
| S2 strain | Among gene groups deleted in Step 28 strain, gene groups recited in [A], uspG, ybdR, |
| | rnk, rna, citT, citG, citX, citF, citE, citD, citC, citA, citB, dcuC, |
| | crcA, cspE, crcB, ybeH, ybeM, yqcA, yqcB, yqcC, syd, yqcD, ygdH, sdaC, |
| | sdaB, exo, fucO, fucA, fucP, fucI, fucK, fucU, fucR, ygdE, ygdD, gcvA, |
| | ygdI, csdA, and ygdK |
| S3 strain | Gene groups deleted in S2 strain, araD, araA, araB, araC, yabI, thiQ, thiP, |
| | tbpA, sgrR, and setA |
| S4 strain | Gene groups deleted in S3 strain, yhfZ, yhfY, yhfX, yhfW, php, yhfU, yhfT, |
| | yhfS, frlR, frlD, frlC, frlB, frlA and yhfL |
| S5 strain | Gene groups deleted in S4 strain, pncA, ydjE, ydjF, ydjG, ydjH, ydjI, ydjJ, |
| | ydjK, ydjL, yeaC and yeaA |
| S6 strain | Gene groups deleted in S5 strain ade, yicO, yicN, yicM, yicS, nlpA, yicL and |
| | setC |
| S7 strain | Gene groups deleted in S6 strain, ygjI, ygjJ, ygjK, fadH, ygjM, ygjN, ygjO, |
| | ygjP, ygjQ, ygjR, alx, sstT and ygjV |
| S8 strain | Gene groups deleted in S7 strain, yrhB, yrhA, yhhZ, yhhY, yhhX, and yhhW |
| S9 strain | Gene groups deleted in S8 strain, yeaK, yoaI, yeaL, yeaM, yeaN, yeaO, yoaF, |
| | yeaP, yeaQ, yoaG, yeaR, yeaS, yeaT, yeaU, yeaV, yeaW, and yeaX |
| S10 strain | Gene groups deleted in S9 strain and hyfA, hyfB, hyfC, hyfD, hyfE, hyfF, |
| | hyfG, hyfH, hyfI, hyfJ, hyfR, and focB |

[0319] Using the strains indicated in Table 2, a growth test was performed. For the growth test, each strain was spread on an LB agar medium (LB medium [Bacto Tryptone (manufactured by Difco) 10 g/l, yeast extract (manufactured by Difco) 10 g/l, sodium chloride 5 g/l] added with Bacto Agar (manufactured by Difco) (15 g/l) and solidified as a plate) containing 30 mg/l kanamycin, and cultured at 37° C. overnight to give bacterial cells. A small amount of respective bacterial cells grown on the LB agar medium was seeded on 5 ml of an LB medium containing 30 mg/l kanamycin and cultured at 37° C. overnight to give a culture. 300 μl of the culture was seeded on 30 ml of a is growth test medium (11.28 g/l 5×M9 premixed salts, 100 mM MOPS buffer, 6% glucose, 1% yeast extract, 2 mM MgSO₄, 0.1 mM CaCl₂, 5 mg/l FeSO₄, pH 6.8, 30 mg/l kanamycin), and cultured with shaking for 24 hr at 30° C. The turbidity of each reduced-genome strain after culture was determined by measuring the absorbance at 660 nm. The turbidity of each reduced-genome strain based on that of the W3110red strain as 100 and the total deletion length of the chromosomal DNA of each reduced-genome strain are shown in Table 3.

TABLE 3

| | Total deleted | Turbidity at |
|---|---|---|
| Strain name | length (kbp) | 24th hr (%) |
| W3110red | 0.0 | 100 |
| Step28 strain | 1027.9 | 127 |
| S1 strain | 1046.5 | 133 |
| S2 strain | 1068.6 | 232 |
| S3 strain | 1081.5 | 221 |
| S4 strain | 1094.3 | 225 |
| S5 strain | 1104.8 | 235 |
| S6 strain | 1113.6 | 238 |
| S7 strain | 1129.1 | 242 |
| S8 strain | 1135.2 | 240 |
| S9 strain | 1148.4 | 227 |
| S10 strain | 1162.0 | 228 |

### (3) ATP Production Activity

[0320] The ATP production activity of W3110red strain, Step28 strain and S10 strain was each measured by the following method. Each strain was spread on an LB agar medium, and cultured at 30° C. overnight. A small amount of the bacterial cells grown on the LB agar medium was scraped and seeded in a 96 well deep well plate containing LB medium (1 ml) containing 3% glucose, and cultured at 30° C. for 24 hr. The turbidity after culture was determined by measuring the absorbance at 590 nm. In addition, the ATP production activity per culture medium was measured by the method described in J. Biomol. Screen., 11, 310 (2006). The ATP production activity of Step28 strain and S10 strain per culture medium based on that of the W3110red strain per culture medium as 100 is shown in Table 4. The S10 strain showed a remarkably improved ATP production activity per culture medium.

TABLE 4

| | | ATP producing |
|---|---|---|
| | Turbidity at 24th hr | activity (%) |
| Strain name | (OD590nm) | per culture solution |
| W3110red | 0.79 | 100 |
| Step28 | 1.23 | 133 |
| S10 | 1.98 | 603 |

### EXAMPLE 2

### Preparation of Xylitol Producing Strain

[0321] A strain, wherein the λ Red recombination system retained by the step28 strain and S10 strain was substituted by a wild-type recBCD recombination system, was prepared as follows.

[0322] The ygdB gene located near the chromosome where the λRed gene group is present is substituted by a DNA fragment containing chloramphenicol resistance gene and levansucrase gene by the method described in JP-A-2004-166576. The P1 phage obtained from the wild-type strain was transduced into the prepared strain to give a sucrose resistant strain, whereby a strain wherein the vicinity of ygdB gene was substituted by a wild-type chromosome fragment (including recBCD gene group) is obtained. The recBCD strains prepared from the Step28 strain and S10 strain were designated as S28W strain and S10W strain, respectively.

[0323] Then, the lacI gene was reintegrated with the S28W strain and S10W strain by the following method. Using the method described in JP-A-2004-166576, a DNA fragment containing chloramphenicol resistance gene and levansucrase gene was inserted into the W3110red strain chromosome while simultaneously deleting the region from the yafW gene to the yahM gene described in Table 1. P1 phage was prepared from said strain, transduced into the S28W strain and S10W strain to give a chloramphenicol resistant strain, whereby lacI revertant, wherein a lacI gene near the marker gene was transduced, was obtained. A marker portion containing chloramphenicol resistance gene and levansucrase gene was removed from the obtained lacI gene revertant by the method described in JP-A-2004-166576. The finally prepared lacI gene revertants derived from S28W strain and S10W strain were designated as S28W_lacI strain and S10W_lacI strain.

[0324] Then, using the method described in Appl. Environ. Microbiol., 73, 7657 (2007), a xylitol-producing gene group was introduced into each of the W3110 strain, S28W_lacI strain and S10W_lacI strain to give strains imparted with conversion capacity from xylose to xylitol. Each of the prepared strains was seeded on a medium (30 ml) containing M9 minimal medium added with 6% glucose, 8% xylose, 1% yeast extract, 0.1 mM IPTG, 100 mM MOPS buffer, and cultured with shaking in a 300 ml baffled flask at 30° C., 250 rpm. The xylitol amount in a culture medium at 46 hr culture was measured. As a result, 14.3, 13.5, 20.6 g/l of xylitol was produced in the culture medium by culturing xylitol-producing strains with W3110 strain, S28W_lacI strain and S10W_lacI strain as parental strains, respectively. The productivity of xylitol was the highest in the strain derived the S10 strain.

### INDUSTRIAL APPLICABILITY

[0325] Using the E. coli mutant strain of the present invention as a host cell, a useful substance can be produced efficiently.

1. An E. coli mutant strain comprising chromosomal DNA (i) comprising the following genes [1] or homologous genes thereof, (ii) not comprising the genes [2] or homologous genes thereof, and (iii) being at least 1040 kbp shorter than that of a wild-type E. coli strain, provided that when the following genes [1] or homologous genes thereof comprise genes that wild-type E. coli strains do not originally contain (hereafter referred to as “NC genes”), the aforementioned E. coli mutant strain derived from the wild-type E. coli strain does not necessarily have the NC gene:
[1] thrL gene, thrA gene, thrB gene, thrC gene, talB gene, mog gene, htgA gene, dnaK gene, dnaJ gene, mokC gene, hokC gene, sokC gene, nhaA gene, nhaR gene, rpsT gene, ribF gene, ileS gene, lspA gene, fkpB gene, ispH gene, rihC gene, dapB gene, carA gene, carB gene, caiF gene, caiE gene, caiD gene, caiC gene, caiB gene, caiA gene, caiT gene, fixA gene, fixB gene, fixC gene, fixX gene, kefF gene, kefC gene, folA gene, apaH gene, apaG gene, ksgA gene, pdxA gene, surA gene, imp gene, djlA gene, rluA gene, hepA gene, polB gene, leuD gene, leuC gene, leuB gene, leuA gene, leuL gene, leuO gene, ilvI gene, ilvH gene, fruR gene, mraZ gene, mraW gene, ftsL gene, ftsI gene, murE gene, murF gene, mraY gene, murD gene, ftsW gene, murG gene, murC gene, ddlB gene, ftsQ gene, ftsA gene, ftsZ gene, lpxC gene, secM gene, secA gene, mutT gene, coaE gene, guaC gene, hofC gene, hofB gene, ppdD gene, nadC gene, ampD gene, ampE gene, aroP gene, pdhR gene, aceE gene, aceF gene, lpd gene, acnB gene, speD gene, speE gene, cueO gene, gcd gene, hpt gene, can gene, panD gene, panC gene, panB gene, htrE gene, ecpD gene, folK gene, pcnB gene, dksA gene, sfsA gene, ligT gene, hrpB gene, mrcB gene, hemL gene, clcA gene, btuF gene, pfs gene, dgt gene, degP gene, cdaR gene, dapD gene, glnD gene, map gene, tff gene, rpsB gene, tsf gene, pyrH gene, frr gene, dxr gene, ispU gene, cdsA gene, hlpA gene, lpxD gene, fabZ gene, lpxA gene, lpxB gene, rnhB gene, dnaE gene, accA gene, ldcC gene, tilS gene, rof gene, nlpE gene, proS gene, rcsF gene, metQ gene, metI gene, metN gene, gmhB gene, rrsH gene, ileV gene, alaV gene, rrlH gene, rrfH gene, aspU gene, dkgB gene, mltD gene, gloB gene, rnhA gene, dnaQ gene, aspV gene, ivy gene, fadE gene, lpcA gene, pepD gene, gpt gene, frsA gene, crl gene, phoE gene, proB gene, proA gene, thrW gene, hemB gene, proC gene, aroL gene, aroM gene, rdgC gene, mak gene, araJ gene, sbcC gene, sbcD gene, phoB gene, phoR gene, brnQ gene, proY gene, malZ gene, queA gene, tgt gene, secD gene, secF gene, tsx gene, ribD gene, ribE gene, nusB gene, thiL gene, pgpA gene, dxs gene, ispA gene, xseB gene, thiI gene, panE gene, cyoE gene, cyoD gene, cyoC gene, cyoB gene, cyoA gene, ampG gene, bolA gene, tig gene, clpP gene, clpX gene, lon gene, hupB gene, ppiD gene, cof gene, mdlA gene, mdlB gene, glnK gene, amtB gene, tesB gene, ffs gene, maa gene, hha gene, acrB gene, acrA gene, acrR gene, kefA gene, priC gene, apt gene, dnaX gene, recR gene, htpG gene, adk gene, hemH gene, aes gene, gsk gene, fsr gene, ushA gene, copA gene, cueR gene, gcl gene, hyi gene, purK gene, purE gene, lpxH gene, ppiB gene, cysS gene, folD gene, sfmA gene, sfmC gene, sfmD gene, sfmH gene, sfmF gene, fimZ gene, argU gene, entD gene, fepA gene, fes gene, entF gene, fepE gene, fepC gene, fepG gene, fepD gene, fepB gene, entC gene, entE gene, entB gene, entA gene, cstA gene, dsbG gene, ahpC gene, ahpF gene, tatE gene, lipA gene, lipB gene, dacA gene, rlpA gene, mrdB gene, mrdA gene, cobC gene, nadD gene, holA gene, rlpB gene, leuS gene, Int gene, miaB gene, ubiF gene, glnX gene, glnV gene, metU gene, glnW gene, glnU gene, leuW gene, metT gene, asnB gene, nagD gene, nagC gene, nagA gene, nagB gene, nagE gene, glnS gene, fur gene, fldA gene, seqA gene, pgm gene, potE gene, speF gene, kdpE gene, kdpD gene, kdpC gene, kdpB gene, kdpA gene, nei gene, abrB gene, gltA gene, sdhC gene, sdhD gene, sdhA gene, sdhB gene, sucA gene, sucB gene, sucC gene, sucD gene, mngR gene, mngA gene, mngB gene, cydA gene, cydB gene, tolQ gene, tolR gene, tolA gene, tolB gene, pal gene, lysT gene, valT gene, lysW gene, valZ gene, lysY gene, lysZ gene, lysQ gene, nadA gene, pnuC gene, zitB gene, aroG gene, gpmA gene, galM gene, galK gene, galT gene, galE gene, modF gene, modE gene, modA gene, modB gene, modC gene, bioA gene, bioB gene, bioF gene, bioC gene, bioD gene, uvrB gene, moaA gene, moaB gene, moaC gene, moaD gene, moaE gene, rhlE gene, dps gene, rhtA gene, ompX gene, rybA gene, mntR gene, fsaA gene, moeB gene, moeA gene, iaaA gene, cmr gene, rybB gene, grxA gene, poxB gene, hcr gene, hcp gene, aqpZ gene, macA gene, macB gene, cspD gene, clpS gene, clpA gene, serW gene, infA gene, aat gene, cydC gene, cydD gene, trxB gene, lrp gene, ftsK gene, lolA gene, serS gene, dmsA gene, dmsB gene, dmsC gene, pflA gene, pflB gene, focA gene, serC gene, aroA gene, cmk gene, rpsA gene, ihfB gene, msbA gene, lpxK gene, kdsB gene, smtA gene, mukF gene, mukE gene, mukB gene, aspC gene, ompF gene, asnS gene, pncB gene, pepN gene, ssuB gene, ssuC gene, ssuD gene, ssuA gene, ssuE gene, pyrD gene, uup gene, pqiA gene, pqiB gene, rmf gene, fabA gene, ompA gene, sulA gene, helD gene, mgsA gene, serT gene, hyaA gene, hyaB gene, hyaC gene, hyaD gene, hyaE gene, hyaF gene, appC gene, appB gene, appA gene, etp gene, serX gene, csgG gene, csgF gene, csgE gene, csgD gene, csgB gene, csgA gene, csgC gene, mdoC gene, mdoG gene, mdoH gene, msyB gene, mdtG gene, lpxL gene, solA gene, dinI gene, pyrC gene, grxB gene, mdtH gene, rimJ gene, mviM gene, mviN gene, flgN gene, flgM gene, flgA gene, flgB gene, flgC gene, flgD gene, flgE gene, flgF gene, flgG gene, flgH gene, flgI gene, flgJ gene, flgK gene, flgL gene, me gene, rluC gene, sraB gene, rpmF gene, plsX gene, fabH gene, fabD gene, fabG gene, acpP gene, fabF gene, pabC gene, tmk gene, holB gene, ptsG gene, fhuE gene, hinT gene, nagZ gene, ndh gene, mfd gene, lolC gene, lolD gene, lolE gene, cobB gene, potD gene, potC gene, potB gene, potA gene, pepT gene, phoQ gene, phoP gene, purB gene, hflD gene, trmU gene, minE gene, minD gene, minC gene, hlyE gene, umuD gene, umuC gene, dsbB gene, nhaB gene, fadR gene, dadA gene, dadX gene, cvrA gene, ldcA gene, emtA gene, treA gene, dhaH gene, dhaL gene, dhaK gene, dhaR gene, pth gene, prsA gene, ispE gene, lolB gene, hemA gene, prfA gene, prmC gene, kdsA gene, ldrA gene, rdlA gene, ldrB gene, rdlB gene, ldrC gene, rdlC gene, chaA gene, chaB gene, chaC gene, narL gene, narX gene, narK gene, narG gene, narH gene, narJ gene, narI gene, rttR gene, tpr gene, tyrV gene, tyrT gene, purU gene, rssA gene, rssB gene, galU gene, has gene, tdk gene, adhE gene, oppA gene, oppB gene, oppC gene, oppD gene, oppF gene, cls gene, kch gene, tonB gene, ompW gene, trpA gene, trpB gene, trpC gene, trpD gene, trpE gene, trpL gene, rluB gene, btuR gene, sohB gene, topA gene, cysB gene, acnA gene, ribA gene, pgpB gene, pyrF gene, osmB gene, gmr gene, rnb gene, fabI gene, sapF gene, sapD gene, sapC gene, sapB gene, sapA gene, puuP gene, puuA gene, puuD gene, puuR gene, puuC gene, puuB gene, puuE gene, pspF gene, pspA gene, pspB gene, pspC gene, pspD gene, pspE gene, ompG gene, tyrR gene, tpx gene, mpaA gene, mppA gene, uspE gene, fnr gene, ogt gene, abgT gene, abgB gene, abgA gene, abgR gene, isrA gene, dbpA gene, uspF gene, ompN gene, micC gene, hslJ gene, ldhA gene, feaR gene, feaB gene, tynA gene, maoC gene, paaA gene, paaB gene, paaC gene, paaD gene, paaE gene, paaF gene, paaG gene, paaH gene, paaI gene, paaJ gene, paaK gene, paaX gene, paaY gene, azoR gene, hrpA gene, aldA gene, gapC_{—}2 gene, gapC_{—}1 gene, cybB gene, hokB gene, mokB gene, sokB gene, trg gene, mdoD gene, rimL gene, tehA gene, tehB gene, ansP gene, nhoA gene, narV gene, narW gene, narY gene, narZ gene, narU gene, fdnG gene, fdnH gene, fdnI gene, adhP gene, sfcA gene, sra gene, bdm gene, osmC gene, ddpF gene, ddpD gene, ddpC gene, ddpB gene, ddpA gene, ddpX gene, dos gene, gadC gene, gadB gene, pqqL gene, hipA gene, hipB gene, ego gene, lsrC gene, lsrD gene, lsrB gene, lsrF gene, lsrG gene, tam gene, uxaB gene, marC gene, marR gene, marA gene, marB gene, eamA gene, dcp gene, rspB gene, rspA gene, speG gene, dmsD gene, clcB gene, dgsA gene, asr gene, mdtI gene, mdtJ gene, pntB gene, pntA gene, folM gene, rstA gene, rstB gene, tus gene, fumC gene, fumA gene, manA gene, uidC gene, uidB gene, uidA gene, uidR gene, hdhA gene, malI gene, malX gene, malY gene, add gene, blr gene, rsxA gene, rsxB gene, rsxC gene, rsxD gene, rsxG gene, rsxE gene, nth gene, gst gene, pdxY gene, tyrS gene, pdxH gene, slyB gene, slyA gene, sodC gene, nemA gene, gloA gene, rnt gene, lhr gene, sodB gene, purR gene, cfa gene, ribC gene, mdtK gene, valV gene, valW gene, pykF gene, lpp gene, sufE gene, sufS gene, sufD gene, sufC gene, sufB gene, sufA gene, rydB gene, rprA gene, aroD gene, pps gene, aroH gene, nlpC gene, btuD gene, btuE gene, btuC gene, ihfA gene, pheT gene, pheS gene, pheM gene, rplT gene, rpmI gene, infC gene, thrS gene, arpB_{—}1 gene, arpB_{—}2 gene, pfkB gene, cedA gene, katE gene, chbG gene, chbF gene, chbR gene, chbA gene, chbC gene, chbB gene, osmE gene, nadE gene, spy gene, astE gene, astB gene, astD gene, astA gene, astC gene, xthA gene, nudG gene, gdhA gene, topB gene, selD gene, sppA gene, ansA gene, gapA gene, mipA gene, rnd gene, fadD gene, pabB gene, sdaA gene, manX gene, manY gene, manZ gene, rrmA gene, cspC gene, kdgR gene, htpX gene, prc gene, proQ gene, pphA gene, ryeA gene, ryeB gene, holE gene, exoX gene, ptrB gene, purT gene, eda gene, edd gene, zwf gene, pykA gene, lpxM gene, znuA gene, znuC gene, znuB gene, ruvB gene, ruvA gene, ruvC gene, nudB gene, aspS gene, torZ gene, torY gene, cutC gene, argS gene, leuZ gene, cysT gene, glyW gene, pgsA gene, dsrA gene, serU gene, asnT gene, shiA gene, amn gene, asnW gene, asnU gene, cbl gene, nac gene, asnV gene, erfK gene, cobT gene, cobS gene, cobU gene, sbmC gene, dacD gene, sbcB gene, hisL gene, hisG gene, hisD gene, hisC gene, hisB gene, hisH gene, hisA gene, hisF gene, hisI gene, cld gene, ugd gene, gnd gene, galF gene, wcaM gene, wcaL gene, wcaK gene, wzxC gene, wcaJ gene, cpsG gene, cpsB gene, wcaI gene, nudD gene, fcl gene, gmd gene, wcaF gene, wcaE gene, wcaD gene, wcaC gene, wcaB gene, wcaA gene, wzc gene, wzb gene, wza gene, asmA gene, dcd gene, udk gene, thiD gene, thiM gene, mrp gene, metG gene, dusC gene, cdd gene, sanA gene, mglC gene, mglA gene, mglB gene, galS gene, folE gene, cirA gene, lysP gene, nfo gene, fruA gene, fruK gene, fruB gene, setB gene, spr gene, rtn gene, bcr gene, rsuA gene, rplY gene, proL gene, narP gene, ccmH gene, ccmG gene, ccmF gene, ccmE gene, ccmD gene, ccmC gene, ccmB gene, ccmA gene, napC gene, napB gene, napH gene, napG gene, napA gene, napD gene, napF gene, eco gene, mqo gene, alkB gene, ada gene, ompC gene, micF gene, rcsD gene, rcsB gene, rcsC gene, atoS gene, atoC gene, atoD gene, atoA gene, atoE gene, atoB gene, gyrA gene, ubiG gene, nrdA gene, nrdB gene, inaA gene, glpQ gene, glpT gene, glpA gene, glpB gene, glpC gene, ais gene, arnT gene, pmrD gene, menE gene, menC gene, menB gene, menD gene, menF gene, nuoN gene, nuoM gene, nuoL gene, nuoK gene, nuoJ gene, nuoI gene, nuoH gene, nuoG gene, nuoF gene, nuoE gene, nuoC gene, nuoB gene, nuoA gene, lrhA gene, ackA gene, pta gene, ubiX gene, purF gene, cvpA gene, dedD gene, folC gene, accD gene, dedA gene, truA gene, usg gene, pdxB gene, flk gene, fabB gene, trmC gene, mepA gene, aroC gene, prmB gene, sixA gene, fadL gene, vacJ gene, argW gene, dsdC gene, dsdX gene, dsdA gene, emrY gene, emrK gene, evgA gene, evgS gene, oxc gene, frc gene, ddg gene, glk gene, mntH gene, nupC gene, alaX gene, alaW gene, gltX gene, valU gene, valX gene, valY gene, lysV gene, xapR gene, xapB gene, xapA gene, ligA gene, zipA gene, cysZ gene, cysK gene, ptsH gene, ptsI gene, crr gene, pdxK gene, cysM gene, cysA gene, cysW gene, cysU gene, cysP gene, ucpA gene, murP gene, amiA gene, hemF gene, eutL gene, eutC gene, eutB gene, eutA gene, eutH gene, eutG gene, eutJ gene, eutE gene, cchB gene, cchA gene, eutI gene, eutT gene, eutQ gene, eutP gene, maeB gene, talA gene, tktB gene, aegA gene, narQ gene, acrD gene, dapE gene, purC gene, nlpB gene, dapA gene, gcvR gene, bcp gene, hda gene, uraA gene, upp gene, purM gene, purN gene, ppk gene, ppx gene, guaA gene, guaB gene, xseA gene, der gene, hisS gene, ispG gene, ndk gene, pbpC gene, sseA gene, ryfA gene, sseB gene, pepB gene, fdx gene, hscA gene, hscB gene, iscA gene, iscU gene, iscS gene, iscR gene, suhB gene, csiE gene, hcaT gene, hcaR gene, hcaE gene, hcaF gene, hcaC gene, hcaB gene, hcaD gene, glyA gene, hmp gene, glnB gene, sroF gene, purL gene, tadA gene, acpS gene, pdxJ gene, recO gene, era gene, me gene, lepB gene, lepA gene, rseC gene, rseB gene, rseA gene, rpoE gene, nadB gene, srmB gene, ung gene, trxC gene, pssA gene, kgtP gene, rrfG gene, rrlG gene, gltW gene, rrsG gene, clpB gene, rluD gene, pheL gene, pheA gene, tyrA gene, aroF gene, rplS gene, trmD gene, rimM gene, rpsP gene, ffh gene, grpE gene, recN gene, smpA gene, smpB gene, ssrA gene, gabD gene, gabT gene, gabP gene, nrdF gene, mprA gene, emrA gene, emrB gene, luxS gene, sraD gene, gshA gene, argQ gene, argZ gene, argY gene, argV gene, serV gene, csrA gene, alaS gene, recX gene, recA gene, mltB gene, norR gene, norV gene, norW gene, hypF gene, hydN gene, ascG gene, ascF gene, ascB gene, hycI gene, hycH gene, hycG gene, hycF gene, hycE gene, hycD gene, hycC gene, hycB gene, hycA gene, hypA gene, hypB gene, hypC gene, hypD gene, hypE gene, fhlA gene, mutS gene, pphB gene, rpoS gene, nlpD gene, pcm gene, surE gene, truD gene, ispF gene, ispD gene, ftsB gene, cysC gene, cysN gene, cysD gene, iap gene, cysH gene, cysI gene, cysJ gene, eno gene, pyrG gene, mazG gene, chpR gene, relA gene, rumA gene, barA gene, gudD gene, gudX gene, gudP gene, mitA gene, metZ gene, metW gene, metV gene, amiC gene, argA gene, recD gene, recB gene, ptr gene, recC gene, ppdC gene, ppdB gene, ppdA gene, thyA gene, lgt gene, ptsP gene, nudH gene, mutH gene, tas gene, aas gene, rygA gene, rygB gene, galR gene, lysA gene, lysR gene, araE gene, kduD gene, kduI gene, lysS gene, prfB gene, recJ gene, dsbC gene, xerD gene, fldB gene, bglA gene, gcvP gene, gcvH gene, gcvT gene, visC gene, ubiH gene, pepP gene, zapA gene, ssrS gene, rygC gene, serA gene, rpiA gene, argP gene, argK gene, argO gene, mscS gene, fbaA gene, pgk gene, epd gene, tktA gene, speB gene, speA gene, metK gene, galP gene, sprT gene, endA gene, gshB gene, ansB gene, mutY gene, mltC gene, nupG gene, speC gene, pheV gene, pitB gene, gss gene, hybG gene, hybF gene, hybE gene, hybD gene, hybC gene, hybB gene, hybA gene, hybO gene, exbD gene, exbB gene, metC gene, dkgA gene, sufI gene, plsC gene, parC gene, parE gene, cpdA gene, nudF gene, tolC gene, zupT gene, ribB gene, glgS gene, rygD gene, rfaE gene, glnE gene, htrG gene, cca gene, bacA gene, folB gene, ttdA gene, ttdB gene, rpsU gene, dnaG gene, rpoD gene, ileX gene, aer gene, ebgR gene, ebgA gene, ebgC gene, uxaA gene, uxaC gene, exuT gene, exuR gene, tdcG gene, tdcF gene, tdcE gene, tdcD gene, tdcC gene, tdcB gene, tdcA gene, tdcR gene, rnpB gene, garK gene, garR gene, garL gene, garP gene, garD gene, sohA gene, agaR gene, kbaZ gene, agaV gene, agaW gene, agaA gene, agaS gene, kbaY gene, agaB gene, agaC gene, agaD gene, agaI gene, mtr gene, deaD gene, nlpI gene, pnp gene, sraG gene, rpsO gene, truB gene, rbfA gene, infB gene, nusA gene, metY gene, argG gene, leuU gene, secG gene, glmM gene, folP gene, ftsH gene, rrmJ gene, greA gene, dacB gene, obgE gene, rpmA gene, rplU gene, ispB gene, sfsB gene, murA gene, kdsD gene, kdsC gene, rpoN gene, ptsN gene, npr gene, mtgA gene, elbB gene, ryhA gene, arcB gene, gltB gene, gltD gene, nanT gene, nanA gene, nanR gene, dcuD gene, sspB gene, sspA gene, rpsI gene, rplM gene, degQ gene, degS gene, mdh gene, argR gene, aaeB gene, aaeA gene, aaeX gene, aaeR gene, tldD gene, rng gene, mreD gene, mreC gene, mreB gene, accB gene, accC gene, panF gene, prmA gene, dusB gene, fis gene, rrfF gene, thrV gene, rrfD gene, rrlD gene, gltV gene, rrsD gene, purH gene, purD gene, zraR gene, zraS gene, zraP gene, hupA gene, nfi gene, hemE gene, nudC gene, rsd gene, thiC gene, thiE gene, thiF gene, thiS gene, thiG gene, thiH gene, htrC gene, rpoC gene, rpoB gene, rplL gene, rplJ gene, rplA gene, rplK gene, nusG gene, secE gene, tufB gene, thrT gene, glyT gene, tyrU gene, thrU gene, coaA gene, birA gene, murB gene, rrfB gene, rrlB gene, gltT gene, rrsB gene, murI gene, btuB gene, trmA gene, fabR gene, sthA gene, oxyR gene, oxyS gene, argH gene, argB gene, argC gene, argE gene, ppc gene, fsaB gene, gldA gene, katG gene, metF gene, metL gene, metB gene, metJ gene, rpmE gene, priA gene, cytR gene, ftsN gene, hslV gene, hslU gene, menA gene, rraA gene, glpF gene, glpK gene, glpX gene, fpr gene, tpiA gene, cdh gene, sbp gene, pfkA gene, fieF gene, cpxP gene, cpxR gene, cpxA gene, kdgT gene, sodA gene, fdhD gene, fdoG gene, fdoH gene, fdoI gene, fdhE gene, bipA gene, ginA gene, glnL gene, glnG gene, hemN gene, csrC gene, spf gene, polA gene, dsbA gene, mobA gene, mobB gene, rrfA gene, rrlA gene, alaT gene, ileT gene, rrsA gene, hemG gene, trkH gene, pepQ gene, fadB gene, fadA gene, fre gene, ubiD gene, rfaH gene, tatD gene, tatC gene, tatB gene, tatA gene, ubiB gene, ubiE gene, rmuC gene, udp gene, metE gene, metR gene, pldB gene, rhtB gene, rhtC gene, recQ gene, pldA gene, rarD gene, corA gene, uvrD gene, xerC gene, dapF gene, cyaY gene, cyaA gene, hemC gene, hemD gene, hemX gene, hemY gene, ryiA gene, aslA gene, aslB gene, proM gene, leuT gene, hisR gene, argX gene, rffM gene, wzyE gene, rffT gene, wzxE gene, rffA gene, rffC gene, rffH gene, rffG gene, rffD gene, rffE gene, wzzE gene, rfe gene, rho gene, rhoL gene, trxA gene, rhlB gene, gpp gene, rep gene, ppiC gene, ilvC gene, ilvY gene, ilvA gene, ilvD gene, ilvE gene, ilvM gene, ilvG_{—}2 gene, ilvG_{—}1 gene, ilvL gene, hdfR gene, trpT gene, aspT gene, rrfC gene, rrlC gene, gltU gene, rrsC gene, asnC gene, mioC gene, oriC gene, gidA gene, gidB gene, atpI gene, atpB gene, atpE gene, atpF gene, atpH gene, atpA gene, atpG gene, atpD gene, atpC gene, glmU gene, glmS gene, pstS gene, pstC gene, pstA gene, pstB gene, phoU gene, bglG gene, bglF gene, bglB gene, bglH gene, cbrC gene, mdtL gene, tnaB gene, tnaA gene, tnaC gene, trmE gene, rnpA gene, rpmH gene, dnaA gene, dnaN gene, recF gene, gyrB gene, ibpA gene, ibpB gene, emrD gene, ivbL gene, ilvB gene, ilvN gene, uhpA gene, uhpB gene, uhpC gene, uhpT gene, selC gene, gltS gene, recG gene, trmH gene, spoT gene, rpoZ gene, gmk gene, ligB gene, dinD gene, rph gene, pyrE gene, ttk gene, dut gene, dfp gene, rpmB gene, rpmG gene, mutM gene, coaD gene, kdtA gene, rfaQ gene, rfaG gene, rfaP gene, rfaS gene, rfaB gene, rfaI gene, rfaJ gene, rfaY gene, rfaZ gene, rfaK gene, rfaL gene, rfaC gene, rfaF gene, rfaD gene, htrL gene, kbl gene, tdh gene, envC gene, gpmI gene, grxC gene, secB gene, gpsA gene, cysE gene, lldD gene, lldR gene, lldP gene, mtlR gene, mtlD gene, mtlA gene, selA gene, selB gene, aldB gene, sgbE gene, sgbU gene, sgbH gene, lyxK gene, avtA gene, malS gene, bax gene, xylR gene, xylH gene, xylG gene, xylF gene, xylA gene, xylB gene, glyQ gene, glyS gene, hokA gene, cspA gene, tiaE gene, bisC gene, tag gene, eptB gene, proK gene, dppA gene, dppB gene, dppC gene, dppD gene, dppF gene, rdlD gene, ldrD gene, bcsG gene, bcsF gene, bcsE gene, bcsA gene, bcsB gene, bcsZ gene, bcsC gene, dctA gene, kdgK gene, treF gene, gadA gene, gadX gene, gadY gene, gadW gene, mdtF gene, mdtE gene, gadE gene, hdeD gene, hdeA gene, hdeB gene, slp gene, arsC gene, arsB gene, arsR gene, gor gene, prlC gene, uspA gene, pitA gene, nikR gene, nikE gene, nikD gene, nikC gene, nikB gene, nikA gene, acpT gene, dcrB gene, zntA gene, ftsY gene, ftsE gene, ftsX gene, rpoH gene, livJ gene, livK gene, livH gene, livM gene, livG gene, livF gene, ugpB gene, ugpA gene, ugpE gene, ugpC gene, ugpQ gene, ggt gene, gntR gene, gntK gene, gntU gene, asd gene, glgB gene, glgX gene, glgC gene, glgA gene, glgP gene, glpD gene, glpE gene, glpG gene, glpR gene, rtcR gene, rtcB gene, rtcA gene, malT gene, malP gene, malQ gene, gntT gene, gntY gene, gntX gene, bioH gene, feoB gene, feoA gene, greB gene, ompR gene, envZ gene, pck gene, hslO gene, hslR gene, nudE gene, mrcA gene, hofQ gene, aroK gene, aroB gene, damX gene, dam gene, rpe gene, gph gene, trpS gene, cysG gene, nirC gene, nirD gene, nirB gene, tsgA gene, ppiA gene, fic gene, pabA gene, argD gene, crp gene, prkB gene, kefG gene, kefB gene, slyD gene, slyX gene, fkpA gene, rpsL gene, rpsG gene, fusA gene, tufA gene, rpsJ gene, rplC gene, rplD gene, rplW gene, rplB gene, rpsS gene, rplV gene, rpsC gene, rplP gene, rpmC gene, rpsQ gene, rplN gene, rplX gene, rplE gene, rpsN gene, rpsH gene, rplF gene, rplR gene, rpsE gene, rpmD gene, rplO gene, secY gene, rpmJ gene, rpsM gene, rpsK gene, rpsD gene, rpoA gene, rplQ gene, zntR gene, mscL gene, trkA gene, rsmB gene, fmt gene, def gene, smf gene, smg gene, aroE gene, rrsE gene, ileU gene, alaU gene, rrlE gene, rrfE gene, metA gene, aceB gene, aceA gene, aceK gene, arpA gene, iclR gene, metH gene, pepE gene, lysC gene, pgi gene, ubiC gene, ubiA gene, plsB gene, dgkA gene, lexA gene, dinF gene, zur gene, qor gene, dnaB gene, alr gene, tyrB gene, aphA gene, uvrA gene, ssb gene, soxS gene, soxR gene, ryjA gene, actP gene, acs gene, nrfA gene, nrfB gene, nrfC gene, nrfD gene, nrfE gene, nrfF gene, nrfG gene, gltP gene, fdhF gene, rpiR gene, rpiB gene, proP gene, basS gene, basR gene, eptA gene, adiC gene, adiY gene, adiA gene, melR gene, melA gene, melB gene, fumB gene, dcuB gene, dcuR gene, dcuS gene, lysU gene, cadA gene, cadB gene, cadC gene, pheU gene, dipZ gene, cutA gene, dcuA gene, aspA gene, fxsA gene, groS gene, groL gene, efp gene, ecnA gene, ecnB gene, sugE gene, blc gene, ampC gene, frdD gene, frdC gene, frdB gene, frdA gene, poxA gene, psd gene, rsgA gene, orn gene, glyV gene, glyX gene, glyY gene, amiB gene, mutL gene, miaA gene, hfq gene, hflX gene, hflK gene, hflC gene, purA gene, rnr gene, rlmB gene, ulaF gene, rpsF gene, priB gene, rpsR gene, rplI gene, fklB gene, cycA gene, cpdB gene, cysQ gene, msrA gene, chpS gene, chpB gene, ppa gene, fbp gene, mpl gene, pmbA gene, cybC gene, nrdG gene, nrdD gene, treC gene, treB gene, treR gene, mgtA gene, pyrI gene, pyrB gene, pyrL gene, argI gene, valS gene, holC gene, pepA gene, idnR gene, idnT gene, idnO gene, idnD gene, idnK gene, leuX gene, dnaC gene, dnaT gene, bglJ gene, fhuF gene, leuV gene, leuP gene, leuQ gene, rsmC gene, holD gene, rimI gene, prfC gene, osmY gene, deoC gene, deoA gene, deoB gene, deoD gene, lplA gene, serB gene, radA gene, nadR gene, slt gene, trpR gene, rob gene, creA gene, creB gene, creC gene, creD gene, arcA gene; and
[2] fhuA gene, fhuC gene, fhuD gene, fhuB gene, yafJ gene, yafK gene, yafQ gene, dinJ gene, yafL gene, yafM gene, fhiA gene, mbhA gene, dinB gene, yafN gene, yafO gene, yafP gene, ykfJ gene, prfH gene, yagP gene, yagQ gene, yagR gene, yagS gene, yagT gene, yagU gene, ykgJ gene, yagV gene, yagW gene, yagX gene, yagY gene, yagZ gene, ykgK gene, ykgL gene, ykgM(JW5034) gene, ykgM(JW5035) gene, eaeH gene, ykgA gene, ykgB gene, ykgI gene, ykgC gene, ykgD gene, ykgE gene, ykgF gene, ykgG gene, ykgH gene, betA gene, betB gene, betI gene, betT gene, yahA gene, yahB gene, yahC gene, yahD gene, yahE gene, yahF gene, yahG gene, yahH gene, yahI gene, yahJ gene, yahK gene, yahL gene, yahM gene, yahN gene, yahO gene, prpR gene, prpB gene, prpC gene, prpD gene, prpE gene, codB gene, codA gene, cynR gene, cynT gene, cynS gene, cynX gene, lacA gene, lacY gene, lacZ gene, lacI gene, mhpR gene, mhpA gene, mhpB gene, mhpC gene, mhpD gene, mhpF gene, mhpE gene, mhpT gene, yaiL gene, frmB gene, frmA gene, frmR gene, yaiO gene, yaiX gene, yaiF gene, yaiP gene, yaiS gene, tauA gene, tauB gene, tauC gene, tauD gene, yaiT gene, yaiU gene, yaiV gene, ampH gene, sbmA gene, yaiW gene, yaiY gene, yaiZ gene, ddlA gene, yaiB gene, phoA gene, psiF gene, yaiC gene, ybbO gene, tesA gene, ybbA gene, ybbP gene, ylbG gene, ybbB gene, ybbS gene, allA gene, allR gene, glxR gene, ybbV gene, ybbW gene, allB gene, ybbY gene, glxK gene, ylbA gene, allC gene, allD gene, fdrA gene, ylbE_{—}1 gene, ylbE_{—}2 gene, ylbF gene, ybcF gene, envY gene, ybcH gene, nfrA gene, nfrB gene, cusS gene, cusR gene, cusC gene, cusF gene, cusB gene, cusA gene, pheP gene, ybdG gene, nfnB gene, ybdF gene, ybdJ gene, ybdK gene, hokE gene, ybeL gene, ybeQ gene, ybeR gene, djlB gene, ybeT gene, ybeU gene, djlC gene, hscC gene, rihA gene, gltL gene, gltK gene, gltJ gene, gltI gene, kdpF gene, ybfA gene, ybgA gene, phr gene, ybiA gene, dinG gene, ybiB gene, ybiC gene, ybiJ gene, ybiI gene, ybiX gene, fiu gene, ybiM gene, ybiN gene, ybiO gene, glnQ gene, glnP gene, glnH gene, yliA gene, yliB gene, yliC gene, yliD gene, yliE gene, yliF gene, yliG gene, yliH gene, yliI gene, yliJ gene, dacC gene, deoR gene, ybjG gene, ybjC gene, nfsA gene, rimK gene, ybjN gene, potF gene, potG gene, potH gene, potI gene, ybjO gene, rumB gene, artJ gene, artM gene, artQ gene, artI gene, artP gene, ybjP gene, ybjQ gene, ybjR gene, ybjS gene, ybjT gene, ltaE gene, ymcC gene, ymcD gene, cspH gene, cspG gene, ymcE gene, gnsA gene, yccM gene, torS gene, torT gene, torR gene, torC gene, torA gene, torD gene, cbpM gene, cbpA gene, yccE gene, agp gene, yccJ gene, wrbA gene, ymdF gene, ycdG gene, ycdH gene, ycdI gene, rarA gene, ycdK gene, ycdL gene, ycdM gene, ycdC gene, putA gene, putP gene, ycdN_{—}1 gene, ycdN_{—}2 gene, ycdO gene, ycdB gene, phoH gene, ycdP gene, ycdQ gene, ycdR gene, ycdS gene, ycdT gene, ymdE gene, ycdU gene, elbA gene, ycgX gene, ycgE gene, ycgF gene, ycgZ gene, ymgA gene, ymgB gene, ymgC gene, ycgG gene, ymgF gene, ycgH_{—}1 gene, ycgH_{—}2 gene, ymgD gene, ymgG gene, ymgH gene, ycgI gene, ydfH gene, ydfZ gene, ydfI gene, ydfJ gene, yecT gene, flhE gene, flhA gene, flhB gene, cheZ gene, cheY gene, cheB gene, cheR gene, tap gene, tar gene, cheW gene, cheA gene, motB gene, motA gene, flhC gene, flhD gene, yecG gene, otsA gene, otsB gene, araH gene, araG gene, araF gene, yecI gene, yecJ gene, isrB gene, yecR gene, ftn gene, yecH gene, tyrP gene, uvrC gene, uvrY gene, yecF gene, sdiA gene, yecC gene, yecS gene, yedO gene, fliY gene, fliZ gene, fliA gene, fliC gene, fliD gene, fliS gene, fliT gene, amyA gene, yedD gene, yedE gene, yedF gene, yedK gene, yedL gene, yedN_{—}2 gene, yedN_{—}1 gene, yedM gene, intG gene, fliE gene, fliF gene, fliG gene, fliH gene, fliI gene, fliJ gene, fliK gene, fliL gene, fliM gene, fliN gene, fliO gene, flip gene, fliQ gene, fliR gene, rcsA gene, dsrB gene, yodD gene, yedA gene, vsr gene, dcm gene, yedJ gene, yedR gene, yedS_{—}1 gene, yedS_{—}2 gene, yedS_{—}3 gene, hchA gene, yedV gene, yedW gene, yedX gene, yedY gene, yedZ gene, yodA gene, wbbL_{—}2 gene, wbbL_{—}1 gene, wbbK gene, wbbJ gene, wbbI gene, wbbH gene, glf gene, rfbX gene, rfbC gene, rfbA gene, rfbD gene, rfbB gene, yegE gene, alkA gene, yegD gene, yegI gene, yegJ gene, yegK gene, yegL gene, ryeC gene, ryeD gene, mdtA gene, mdtB gene, mdtC gene, mdtD gene, baeS gene, baeR gene, yegP gene, yegQ gene, ryeE gene, ogrK gene, yegZ gene, yegR gene, yegS gene, gatR_{—}1 gene, gatR_{—}2 gene, gatD gene, gatC gene, gatB gene, gatA gene, gatZ gene, gatY gene, fbaB gene, yegT gene, yegU gene, yegV gene, yegW gene, yegX gene, molR_{—}1 gene, molR_{—}2 gene, molR_{—}3 gene, yehI gene, yehK gene, yehL gene, yehM gene, yehP gene, yehQ gene, yehR gene, yehS gene, yehT gene, yehU gene, mlrA gene, yohO gene, yehW gene, yehX gene, yehY gene, yehZ gene, bglX gene, did gene, pbpG gene, yohC gene, yelI gene, yeiJ gene, rihB gene, yeiL gene, yeiM gene, yeiN gene, yeiC gene, elaB gene, elaA gene, elaC gene, elaD gene, yfbK gene, yfbL gene, yfbM gene, yfbN gene, yfbO gene, yfbP gene, yfcC gene, yfcD gene, yfcE gene, yfcF gene, yfcG gene, folX gene, yfcH gene, yfcI gene, hisP gene, hisM gene, hisQ gene, hisJ gene, argT gene, ypdA gene, ypdB gene, ypdC gene, ypdD gene, ypdE gene, ypdF gene, ypdG gene, ypdH gene, pinH gene, ypjB gene, ypjC gene, ileY gene, ygaQ gene, ygaR gene, yqaC gene, yqaD gene, ygaT gene, csiR gene, ygaU gene, yqaE gene, ygaV gene, ygaP gene, stpA gene, ygaW gene, ygaC gene, ygaM gene, nrdH gene, nrdI gene, nrdE gene, proV gene, proW gene, proX gene, ygaX gene, ygaY gene, ygaZ gene, ygaH gene, srlA gene, srlE gene, srlB gene, srlD gene, gutM gene, srlR gene, gutQ gene, yqeG gene, yqeH gene, yqeI gene, yqeJ gene, yqeK gene, ygeF gene, ygeG gene, ygeH gene, ygeI gene, pbl gene, ygeK gene, ygeL gene, ygeM gene, ygeN gene, ygeO gene, ygeP gene, ygeQ gene, glyU gene, ygeR gene, xdhA gene, xdhB gene, xdhC gene, ygeV gene, ygeW gene, ygeX gene, ygeY gene, hyuA gene, yqeA gene, yqeB gene, yqeC gene, ygfJ gene, ygfK gene, ssnA gene, ygfM gene, xdhD gene, ygfO gene, guaD gene, ygfQ gene, ygfS gene, ygfT gene, ygfU gene, idi gene, cmtA gene, cmtB gene, yghD gene, yghE gene, yghF gene, yghG gene, pppA gene, yghJ gene, yghK gene, glcB gene, glcG gene, glcF gene, glcE gene, glcD gene, glcC gene, yghO gene, yghQ gene, yghR gene, yghS gene, yghT gene, ygiS gene, ygiT gene, ygiU gene, ygiV gene, ygiW gene, qseB gene, qseC gene, ygiZ gene, mdaB gene, ygiN gene, gltF gene, yhcA gene, yhcD gene, yhcE gene, yhcF gene, yhcG gene, yhcH gene, nanK gene, nanE gene, yhdJ gene, yhdU gene, envR gene, acrE gene, acrF gene, yhdV gene, yhdW gene, yhdX gene, yhdY gene, yijP gene, yijO gene, frwD gene, pflC gene, pflD gene, frwB gene, frwC gene, ptsA gene, rhaT gene, rhaR gene, rhaS gene, rhaB gene, rhaA gene, rhaD gene, yiiL gene, frvA gene, frvB gene, frvX gene, frvR gene, yiiG gene, yiiF gene, yiiE gene, yiiD gene, dtd gene, rbn gene, yihX gene, yihW gene, yihV gene, yihU gene, yihT gene, yihS gene, yihR gene, yihQ gene, yihP gene, yihO gene, ompL gene, yihN gene, yihM gene, yihL gene, hsrA gene, rbsR gene, rbsK gene, rbsB gene, rbsC gene, rbsA gene, rbsD gene, trkD gene, yieN gene, yieM gene, asnA gene, yidB gene, yidA gene, yidX gene, dgoR gene, dgoK gene, dgoA gene, dgoD gene, dgoT gene, cbrA gene, yidR gene, yidQ gene, yidE gene, yidP gene, glvC gene, glvB gene, glvG gene, ysdC gene, yidL gene, yidK gene, yidJ gene, yidI gene, yidH gene, yidG gene, yidF gene, yhiN gene, yhiM gene, yhiL gene, yhiK gene, yhiJ gene, yhiI gene, rbbA gene, yhhJ gene, chiA gene, bfd gene, bfr gene, gspO gene, gspM gene, gspL gene, gspK gene, gspJ gene, gspI gene, gspH gene, gspG gene, gspF gene, gspE gene, gspD gene, gspC gene, gspA gene, pioO gene, yjbE gene, yjbF gene, yjbG gene, yjbH gene, yjbA gene, xylE gene, malG gene, malF gene, malE gene, malK gene, lamB gene, malM gene, yjbI gene, yjcP gene, yjcQ gene, yjcR gene, yjcS gene, alsK gene, alsE gene, alsC gene, alsA gene, alsB gene, yjdP gene, phnP gene, phnO gene, phnN gene, phnM gene, phnL gene, phnK gene, phnJ gene, phnI gene, phnH gene, phnG gene, phnF gene, phnE(JW4064) gene, phnE(JW4065) gene, phnD gene, phnC gene, phnB gene, phnA gene, yjdA gene, yjcZ gene, yjfI gene, yjfJ gene, yjfK gene, yjfL gene, yjfM gene, yjfC gene, aidB gene, yjfN gene, yjfO gene, yjfP gene, ulaR gene, ulaG gene, ulaA gene, ulaB gene, ulaC gene, ulaD gene, ulaE gene, yjhS gene, yjhT gene, yjhA gene, fimB gene, fimE gene, fimA gene, fimI gene, fimC gene, fimD gene, fimF gene, fimG gene, fimH gene, gntP gene, uxuA gene, uxuB gene, uxuR gene, yjiC gene, yjiD gene, yjiE gene, iadA gene, yjiG gene, yjiH gene, kptA gene, yjiJ gene, yjiK gene, yjiL gene, yjiM gene, yjiN gene, yjiO gene, yjiP gene, yjiQ gene, yjiR gene, yjiS gene, yjiT gene, yjiV gene, mcrC gene, mcrB gene, yjiW gene, hsdS gene, hsdM gene, hsdR gene, mrr gene, yjiA gene, yjiX gene, yjiY gene, tsr gene, yjiZ gene, yjjM gene, yjjN gene, mdoB gene, yjjA gene.

2. The E. coli mutant strain according to claim 1, comprising chromosomal DNA that comprises DNA having the nucleotide sequences as shown in [1] to [83] below of the nucleotide sequence as shown in SEQ ID NO: 1 or DNA equivalent thereto:
[1] a nucleotide sequence of nucleotides 1 to 15298
[2] a nucleotide sequence of nucleotides 16751 to 19620
[3] a nucleotide sequence of nucleotides 20815 to 65857
[4] a nucleotide sequence of nucleotides 78797 to 167400
[5] a nucleotide sequence of nucleotides 173316 to 244300
[6] a nucleotide sequence of nucleotides 253747 to 262299
[7] a nucleotide sequence of nucleotides 387868 to 389474
[8] a nucleotide sequence of nucleotides 404040 to 518365
[9] a nucleotide sequence of nucleotides 533048 to 535840
[10] a nucleotide sequence of nucleotides 550552 to 564276
[11] a nucleotide sequence of nucleotides 608455 to 640668
[12] a nucleotide sequence of nucleotides 659193 to 675439
[13] a nucleotide sequence of nucleotides 689711 to 729156
[14] a nucleotide sequence of nucleotides 739930 to 832888
[15] a nucleotide sequence of nucleotides 848427 to 867974
[16] a nucleotide sequence of nucleotides 883811 to 891334
[17] a nucleotide sequence of nucleotides 909717 to 1049224
[18] a nucleotide sequence of nucleotides 1097358 to 1105534
[19] a nucleotide sequence of nucleotides 1106991 to 1196528
[20] a nucleotide sequence of nucleotides 1225485 to 1295721
[21] a nucleotide sequence of nucleotides 1297023 to 1300822
[22] a nucleotide sequence of nucleotides 1302896 to 1397636
[23] a nucleotide sequence of nucleotides 1399079 to 1413662
[24] a nucleotide sequence of nucleotides 1436899 to 1469664
[25] a nucleotide sequence of nucleotides 1472404 to 1504839
[26] a nucleotide sequence of nucleotides 1506619 to 1528866
[27] a nucleotide sequence of nucleotides 1534766 to 1630050
[28] a nucleotide sequence of nucleotides 1654610 to 1853604
[29] a nucleotide sequence of nucleotides 1864144 to 1875287
[30] a nucleotide sequence of nucleotides 1888500 to 1963662
[31] a nucleotide sequence of nucleotides 1992215 to 1995800
[32] a nucleotide sequence of nucleotides 2027349 to 2032587
[33] a nucleotide sequence of nucleotides 2043516 to 2068287
[34] a nucleotide sequence of nucleotides 2081066 to 2103531
[35] a nucleotide sequence of nucleotides 2115204 to 2145402
[36] a nucleotide sequence of nucleotides 2186995 to 2199807
[37] a nucleotide sequence of nucleotides 2228990 to 2255033
[38] a nucleotide sequence of nucleotides 2262631 to 2292234
[39] a nucleotide sequence of nucleotides 2293834 to 2324498
[40] a nucleotide sequence of nucleotides 2322075 to 2411311
[41] a nucleotide sequence of nucleotides 2413007 to 2422503
[42] a nucleotide sequence of nucleotides 2433238 to 2471990
[43] a nucleotide sequence of nucleotides 2482140 to 2504213
[44] a nucleotide sequence of nucleotides 2513697 to 2519690
[45] a nucleotide sequence of nucleotides 2521089 to 2599856
[46] a nucleotide sequence of nucleotides 2613439 to 2754814
[47] a nucleotide sequence of nucleotides 2788619 to 2794311
[48] a nucleotide sequence of nucleotides 2800029 to 2803445
[49] a nucleotide sequence of nucleotides 2809286 to 2824451
[50] a nucleotide sequence of nucleotides 2829399 to 2909409
[51] a nucleotide sequence of nucleotides 2909710 to 2921193
[52] a nucleotide sequence of nucleotides 2943639 to 2984497
[53] a nucleotide sequence of nucleotides 3032267 to 3076223
[54] a nucleotide sequence of nucleotides 3078056 to 3109245
[55] a nucleotide sequence of nucleotides 3133480 to 3164769
[56] a nucleotide sequence of nucleotides 3172082 to 3184621
[57] a nucleotide sequence of nucleotides 3186056 to 3224889
[58] a nucleotide sequence of nucleotides 3240401 to 3261074
[59] a nucleotide sequence of nucleotides 3262220 to 3361080
[60] a nucleotide sequence of nucleotides 3370892 to 3411501
[61] a nucleotide sequence of nucleotides 3421222 to 3486426
[62] a nucleotide sequence of nucleotides 3496906 to 3536155
[63] a nucleotide sequence of nucleotides 3549687 to 3556477
[64] a nucleotide sequence of nucleotides 3576239 to 3697304
[65] a nucleotide sequence of nucleotides 3709527 to 3742812
[66] a nucleotide sequence of nucleotides 3744293 to 3748980
[67] a nucleotide sequence of nucleotides 3747997 to 3750486
[68] a nucleotide sequence of nucleotides 3751906 to 3762908
[69] a nucleotide sequence of nucleotides 3772817 to 3774086
[70] a nucleotide sequence of nucleotides 3785257 to 3794687
[71] a nucleotide sequence of nucleotides 3803459 to 3868134
[72] a nucleotide sequence of nucleotides 3878460 to 3918087
[73] a nucleotide sequence of nucleotides 3919815 to 3986454
[74] a nucleotide sequence of nucleotides 3988342 to 4003004
[75] a nucleotide sequence of nucleotides 4021347 to 4055371
[76] a nucleotide sequence of nucleotides 4061466 to 4128290
[77] a nucleotide sequence of nucleotides 4141016 to 4170562
[78] a nucleotide sequence of nucleotides 4186909 to 4239493
[79] a nucleotide sequence of nucleotides 4255871 to 4303000
[80] a nucleotide sequence of nucleotides 4316735 to 4318540
[81] a nucleotide sequence of nucleotides 4334946 to 4414758
[82] a nucleotide sequence of nucleotides 4428378 to 4501437
[83] a nucleotide sequence of nucleotides 4604873 to 4646332.

3. The E. coli mutant strain according to claim 1, comprising chromosomal DNA that does not comprise uspG gene, ybdR gene, rnk gene, rna gene, citT gene, citG gene, citX gene, citF gene, citE gene, citD gene, citC gene, citA gene, citB gene, dcuC gene, crcA gene, cspE gene, crcB gene, ybeH gene, and ybeM gene, or homologous gene thereof.

4. The E. coli mutant strain according to claim 1, comprising chromosomal DNA that does not comprise DNA having a nucleotide sequence of nucleotides 640669 to 659192 in the nucleotide sequence as shown in SEQ ID NO: 1 or DNA equivalent thereto.

5. The E. coli mutant strain according to claim 1, comprising chromosomal DNA that does not comprise yqcA gene, yqcB gene, yqcC gene, syd gene, yqcD gene, ygdH gene, sdaC gene, sdaB gene, exo gene, fucO gene, fucA gene, fucP gene, fucI gene, fucK gene, fucU gene, fucR gene, ygdE gene, ygdD gene, gcvA gene, ygdI gene, csdA gene, and ygdK gene, or homologous gene thereof and comprise chpA gene, or homologous gene thereof.

6. The E. coli mutant strain according claim 1, comprising chromosomal DNA that does not comprise DNA having a nucleotide sequence of nucleotides 2921194 to 2943638 in the nucleotide sequence as shown in SEQ ID NO: 1 or DNA equivalent thereto.

7. The E. coli mutant strain according to claim 1, comprising chromosomal DNA that does not comprise araD gene, araA gene, araB gene, araC gene, yabI gene, thiQ gene, thiP gene, tbpA gene, sgrR gene, and setA gene, or homologous gene thereof.

8. The E. coli mutant strain according to claim 1, comprising chromosomal DNA that does not comprise DNA having a nucleotide sequences of nucleotides 65858 to 78796 in the nucleotide sequence as shown in SEQ ID NO: 1 or DNA equivalent thereto.

9. The E. coli mutant strain according to claim 1, comprising chromosomal DNA that does not comprise yhfZ gene, yhfY gene, yhfX gene, yhfW gene, php gene, yhfU gene, yhfT gene, yhfS gene, frlR gene, frlD gene, frlC gene, frlB gene, frlA gene, and yhfL gene, or homologous gene thereof.

10. The E. coli mutant strain according to claim 1, comprising chromosomal DNA that does not comprise DNA having a nucleotide sequence of nucleotides 4128291 to 4141015 in the nucleotide sequence as shown in SEQ ID NO: 1 or DNA equivalent thereto.

11. The E. coli mutant strain according to claim 1, comprising chromosomal DNA that does not comprise pncA gene, ydjE gene, ydjF gene, ydjG gene, ydjH gene, ydjI gene, ydjJ gene, ydjK gene, ydjL gene, yeaC gene, and yeaA gene, or homologous gene thereof.

12. The E. coli mutant strain according to claim 1, comprising chromosomal DNA that does not comprise DNA having a nucleotide sequence of nucleotides 1853605 to 1864143 in the nucleotide sequence as shown in SEQ ID NO: 1 or DNA equivalent thereto.

13. The E. coli mutant strain according to claim 1, comprising chromosomal DNA that does not comprise ade gene, yicO gene, yicN gene, yicM gene, yicS gene, nlpA gene, yicL gene, and setC gene, or homologous gene thereof.

14. The E. coli mutant strain according to claim 1, comprising chromosomal DNA that does not comprise DNA having a nucleotide sequence of nucleotides 3794688 to 3803458 in the nucleotide sequence as shown in SEQ ID NO: 1 or DNA equivalent thereto.

15. The E. coli mutant strain according to claim 1, comprising chromosomal DNA that does not comprise ygjI gene, ygjJ gene, ygjK gene, fadH gene, ygjM gene, ygjN gene, ygjO gene, ygjP gene, ygjQ gene, ygjR gene, alx gene, sstT gene, and ygjV gene, or homologous gene thereof.

16. The E. coli mutant strain according to claim 1, comprising chromosomal DNA that does not comprise DNA having a nucleotide sequence of nucleotides 3224890 to 3240400 in the nucleotide sequence as shown in SEQ ID NO: 1 or DNA equivalent thereto.

17. The E. coli mutant strain according to claim 1, comprising chromosomal DNA that does not comprise yrhB gene, yrhA gene, yhhZ gene, yhhY gene, yhhX gene, and yhhW gene, or homologous gene thereof.

18. The E. coli mutant strain according to claim 1, comprising chromosomal DNA that does not comprise DNA having a nucleotide sequence of nucleotides 4055372 to 4061465 in the nucleotide sequence as shown in SEQ ID NO: 1 or DNA equivalent thereto.

19. The E. coli mutant strain according to claim 1, comprising chromosomal DNA that does not comprise yeaK gene, yoaI gene, yeaL gene, yeaM gene, yeaN gene, yeaO gene, yoaF gene, yeaP gene, yeaQ gene, yoaG gene, yeaR gene, yeaS gene, yeaT gene, yeaU gene, yeaV gene, yeaW gene, and yeaX gene, or homologous gene thereof.

20. The E. coli mutant strain according to claim 1, comprising chromosomal DNA that does not comprise DNA having a nucleotide sequence of nucleotides 1875288 to 1888499 in the nucleotide sequence as shown in SEQ ID NO: 1 or DNA equivalent thereto.

21. The E. coli mutant strain according to claim 1, comprising chromosomal DNA that does not comprise hyfA gene, hyfB gene, hyfC gene, hyfD gene, hyfE gene, hyfF gene, hyfG gene, hyfH gene, hyfI gene, hyfJ gene, hyfR gene, and focB gene, or homologous gene thereof.

22. The E. coli mutant strain according to claim 1, comprising chromosomal DNA that does not comprise DNA having a nucleotide sequence of nucleotides 2599857 to 2613438 in the nucleotide sequence as shown in SEQ ID NO: 1 or DNA equivalent thereto.

23. An E. coli mutant strain comprising chromosomal DNA comprising the following genes [1] or homologous genes thereof, comprising not more than 10% of the genes [2] and [3] or homologous genes thereof, and being at least 1040 kbp shorter than that of a wild-type E. coli strain, provided that when the following genes [1] or homologous genes thereof comprise NC genes, the aforementioned E. coli mutant strain derived from the wild-type E. coli strain does not necessarily have the NC gene:
[1] thrL gene, thrA gene, thrB gene, thrC gene, talB gene, mog gene, htgA gene, dnaK gene, dnaJ gene, mokC gene, hokC gene, sokC gene, nhaA gene, nhaR gene, rpsT gene, ribF gene, ileS gene, lspA gene, fkpB gene, ispH gene, rihC gene, dapB gene, carA gene, carB gene, caiF gene, caiE gene, caiD gene, caiC gene, caiB gene, caiA gene, caiT gene, fixA gene, fixB gene, fixC gene, fixX gene, kefF gene, kefC gene, folA gene, apaH gene, apaG gene, ksgA gene, pdxA gene, surA gene, imp gene, djlA gene, rluA gene, hepA gene, polB gene, leuD gene, leuC gene, leuB gene, leuA gene, leuL gene, leuO gene, ilvI gene, ilvH gene, fruR gene, mraZ gene, mraW gene, ftsL gene, ftsI gene, murE gene, murF gene, mraY gene, murD gene, ftsW gene, murG gene, murC gene, ddlB gene, ftsQ gene, ftsA gene, ftsZ gene, lpxC gene, secM gene, secA gene, mutT gene, coaE gene, guaC gene, hofC gene, hofB gene, ppdD gene, nadC gene, ampD gene, ampE gene, aroP gene, pdhR gene, aceE gene, aceF gene, lpd gene, acnB gene, speD gene, speE gene, cueO gene, gcd gene, hpt gene, can gene, panD gene, panC gene, panB gene, htrE gene, ecpD gene, folK gene, pcnB gene, dksA gene, sfsA gene, ligT gene, hrpB gene, mrcB gene, hemL gene, clcA gene, btuF gene, pfs gene, dgt gene, degP gene, cdaR gene, dapD gene, glnD gene, map gene, tff gene, rpsB gene, tsf gene, pyrH gene, frr gene, dxr gene, ispU gene, cdsA gene, hlpA gene, lpxD gene, fabZ gene, lpxA gene, lpxB gene, rnhB gene, dnaE gene, accA gene, ldcC gene, tilS gene, rof gene, nlpE gene, proS gene, rcsF gene, metQ gene, metI gene, metN gene, gmhB gene, rrsH gene, ileV gene, alaV gene, rrlH gene, rrfH gene, aspU gene, dkgB gene, mltD gene, gloB gene, rnhA gene, dnaQ gene, aspV gene, ivy gene, fadE gene, lpcA gene, pepD gene, gpt gene, frsA gene, crl gene, phoE gene, proB gene, proA gene, thrW gene, hemB gene, proC gene, aroL gene, aroM gene, rdgC gene, mak gene, araJ gene, sbcC gene, sbcD gene, phoB gene, phoR gene, brnQ gene, proY gene, malZ gene, queA gene, tgt gene, secD gene, secF gene, tsx gene, ribD gene, ribE gene, nusB gene, thiL gene, pgpA gene, dxs gene, ispA gene, xseB gene, thiI gene, panE gene, cyoE gene, cyoD gene, cyoC gene, cyoB gene, cyoA gene, ampG gene, bolA gene, tig gene, clpP gene, clpX gene, lon gene, hupB gene, ppiD gene, cof gene, mdlA gene, mdlB gene, glnK gene, amtB gene, tesB gene, ffs gene, maa gene, hha gene, acrB gene, acrA gene, acrR gene, kefA gene, priC gene, apt gene, dnaX gene, recR gene, htpG gene, adk gene, hemH gene, aes gene, gsk gene, fsr gene, ushA gene, copA gene, cueR gene, gcl gene, hyi gene, purK gene, purE gene, lpxH gene, ppiB gene, cysS gene, folD gene, sfmA gene, sfmC gene, sfmD gene, sfmH gene, sfmF gene, fimZ gene, argU gene, entD gene, fepA gene, fes gene, entF gene, fepE gene, fepC gene, fepG gene, fepD gene, fepB gene, entC gene, entE gene, entB gene, entA gene, cstA gene, dsbG gene, ahpC gene, ahpF gene, tatE gene, lipA gene, lipB gene, dacA gene, rlpA gene, mrdB gene, mrdA gene, cobC gene, nadD gene, holA gene, rlpB gene, leuS gene, Int gene, miaB gene, ubiF gene, glnX gene, glnV gene, metU gene, glnW gene, glnU gene, leuW gene, metT gene, asnB gene, nagD gene, nagC gene, nagA gene, nagB gene, nagE gene, glnS gene, fur gene, fldA gene, seqA gene, pgm gene, potE gene, speF gene, kdpE gene, kdpD gene, kdpC gene, kdpB gene, kdpA gene, nei gene, abrB gene, gltA gene, sdhC gene, sdhD gene, sdhA gene, sdhB gene, sucA gene, sucB gene, sucC gene, sucD gene, mngR gene, mngA gene, mngB gene, cydA gene, cydB gene, tolQ gene, tolR gene, tolA gene, tolB gene, pal gene, lysT gene, valT gene, lysW gene, valZ gene, lysY gene, lysZ gene, lysQ gene, nadA gene, pnuC gene, zitB gene, aroG gene, gpmA gene, galM gene, galK gene, galT gene, galE gene, modF gene, modE gene, modA gene, modB gene, modC gene, bioA gene, bioB gene, bioF gene, bioC gene, bioD gene, uvrB gene, moaA gene, moaB gene, moaC gene, moaD gene, moaE gene, rhlE gene, dps gene, rhtA gene, ompX gene, rybA gene, mntR gene, fsaA gene, moeB gene, moeA gene, iaaA gene, cmr gene, rybB gene, grxA gene, poxB gene, hcr gene, hcp gene, aqpZ gene, macA gene, macB gene, cspD gene, clpS gene, clpA gene, serW gene, infA gene, aat gene, cydC gene, cydD gene, trxB gene, lrp gene, ftsK gene, lolA gene, serS gene, dmsA gene, dmsB gene, dmsC gene, pflA gene, pflB gene, focA gene, serC gene, aroA gene, cmk gene, rpsA gene, ihfB gene, msbA gene, lpxK gene, kdsB gene, smtA gene, mukF gene, mukE gene, mukB gene, aspC gene, ompF gene, asnS gene, pncB gene, pepN gene, ssuB gene, ssuC gene, ssuD gene, ssuA gene, ssuE gene, pyrD gene, uup gene, pqiA gene, pqiB gene, rmf gene, fabA gene, ompA gene, sulA gene, helD gene, mgsA gene, serT gene, hyaA gene, hyaB gene, hyaC gene, hyaD gene, hyaE gene, hyaF gene, appC gene, appB gene, appA gene, etp gene, serX gene, csgG gene, csgF gene, csgE gene, csgD gene, csgB gene, csgA gene, csgC gene, mdoC gene, mdoG gene, mdoH gene, msyB gene, mdtG gene, lpxL gene, solA gene, dinI gene, pyrC gene, grxB gene, mdtH gene, rimJ gene, mviM gene, mviN gene, flgN gene, flgM gene, flgA gene, flgB gene, flgC gene, flgD gene, flgE gene, flgF gene, flgG gene, flgH gene, flgI gene, flgJ gene, flgK gene, flgL gene, me gene, rluC gene, sraB gene, rpmF gene, plsX gene, fabH gene, fabD gene, fabG gene, acpP gene, fabF gene, pabC gene, tmk gene, holB gene, ptsG gene, fhuE gene, hinT gene, nagZ gene, ndh gene, mfd gene, lolC gene, lolD gene, lolE gene, cobB gene, potD gene, potC gene, potB gene, potA gene, pepT gene, phoQ gene, phoP gene, purB gene, hflD gene, trmU gene, minE gene, minD gene, minC gene, hlyE gene, umuD gene, umuC gene, dsbB gene, nhaB gene, fadR gene, dadA gene, dadX gene, cvrA gene, ldcA gene, emtA gene, treA gene, dhaH gene, dhaL gene, dhaK gene, dhaR gene, pth gene, prsA gene, ispE gene, lolB gene, hemA gene, prfA gene, prmC gene, kdsA gene, ldrA gene, rdlA gene, ldrB gene, rdlB gene, ldrC gene, rdlC gene, chaA gene, chaB gene, chaC gene, narL gene, narX gene, narK gene, narG gene, narH gene, narJ gene, narI gene, rttR gene, tpr gene, tyrV gene, tyrT gene, purU gene, rssA gene, rssB gene, galU gene, has gene, tdk gene, adhE gene, oppA gene, oppB gene, oppC gene, oppD gene, oppF gene, cls gene, kch gene, tonB gene, ompW gene, trpA gene, trpB gene, trpC gene, trpD gene, trpE gene, trpL gene, rluB gene, btuR gene, sohB gene, topA gene, cysB gene, acnA gene, ribA gene, pgpB gene, pyrF gene, osmB gene, gmr gene, rnb gene, fabI gene, sapF gene, sapD gene, sapC gene, sapB gene, sapA gene, puuP gene, puuA gene, puuD gene, puuR gene, puuC gene, puuB gene, puuE gene, pspF gene, pspA gene, pspB gene, pspC gene, pspD gene, pspE gene, ompG gene, tyrR gene, tpx gene, mpaA gene, mppA gene, uspE gene, fnr gene, ogt gene, abgT gene, abgB gene, abgA gene, abgR gene, isrA gene, dbpA gene, uspF gene, ompN gene, micC gene, hslJ gene, ldhA gene, feaR gene, feaB gene, tynA gene, maoC gene, paaA gene, paaB gene, paaC gene, paaD gene, paaE gene, paaF gene, paaG gene, paaH gene, paaI gene, paaJ gene, paaK gene, paaX gene, paaY gene, azoR gene, hrpA gene, aldA gene, gapC_{—}2 gene, gapC_{—}1 gene, cybB gene, hokB gene, mokB gene, sokB gene, trg gene, mdoD gene, rimL gene, tehA gene, tehB gene, ansP gene, nhoA gene, narV gene, narW gene, narY gene, narZ gene, narU gene, fdnG gene, fdnH gene, fdnI gene, adhP gene, sfcA gene, sra gene, bdm gene, osmC gene, ddpF gene, ddpD gene, ddpC gene, ddpB gene, ddpA gene, ddpX gene, dos gene, gadC gene, gadB gene, pqqL gene, hipA gene, hipB gene, ego gene, lsrC gene, lsrD gene, lsrB gene, lsrF gene, lsrG gene, tam gene, uxaB gene, marC gene, marR gene, marA gene, marB gene, eamA gene, dcp gene, rspB gene, rspA gene, speG gene, dmsD gene, cicB gene, dgsA gene, asr gene, mdtI gene, mdtJ gene, pntB gene, pntA gene, folM gene, rstA gene, rstB gene, tus gene, fumC gene, fumA gene, manA gene, uidC gene, uidB gene, uidA gene, uidR gene, hdhA gene, malI gene, malX gene, malY gene, add gene, blr gene, rsxA gene, rsxB gene, rsxC gene, rsxD gene, rsxG gene, rsxE gene, nth gene, gst gene, pdxY gene, tyrS gene, pdxH gene, slyB gene, slyA gene, sodC gene, nemA gene, gloA gene, rnt gene, lhr gene, sodB gene, purR gene, cfa gene, ribC gene, mdtK gene, valV gene, valW gene, pykF gene, lpp gene, sufE gene, sufS gene, sufD gene, sufC gene, sufB gene, sufA gene, rydB gene, rprA gene, aroD gene, pps gene, aroH gene, nlpC gene, btuD gene, btuE gene, btuC gene, ihfA gene, pheT gene, pheS gene, pheM gene, rplT gene, rpmI gene, infC gene, thrS gene, arpB_{—}1 gene, arpB_{—}2 gene, pfkB gene, cedA gene, katE gene, chbG gene, chbF gene, chbR gene, chbA gene, chbC gene, chbB gene, osmE gene, nadE gene, spy gene, astE gene, astB gene, astD gene, astA gene, astC gene, xthA gene, nudG gene, gdhA gene, topB gene, selD gene, sppA gene, ansA gene, gapA gene, mipA gene, rnd gene, fadD gene, pabB gene, sdaA gene, manX gene, manY gene, manZ gene, rrmA gene, cspC gene, kdgR gene, htpX gene, prc gene, proQ gene, pphA gene, ryeA gene, ryeB gene, holE gene, exoX gene, ptrB gene, purT gene, eda gene, edd gene, zwf gene, pykA gene, lpxM gene, znuA gene, znuC gene, znuB gene, ruvB gene, ruvA gene, ruvC gene, nudB gene, aspS gene, torZ gene, torY gene, cutC gene, argS gene, leuZ gene, cysT gene, glyW gene, pgsA gene, dsrA gene, serU gene, asnT gene, shiA gene, amn gene, asnW gene, asnU gene, cbl gene, nac gene, asnV gene, erfK gene, cobT gene, cobS gene, cobU gene, sbmC gene, dacD gene, sbcB gene, hisL gene, hisG gene, hisD gene, hisC gene, hisB gene, hisH gene, hisA gene, hisF gene, hisI gene, cld gene, ugd gene, gnd gene, galF gene, wcaM gene, wcaL gene, wcaK gene, wzxC gene, wcaJ gene, cpsG gene, cpsB gene, wcaI gene, nudD gene, fcl gene, gmd gene, wcaF gene, wcaE gene, wcaD gene, wcaC gene, wcaB gene, wcaA gene, wzc gene, wzb gene, wza gene, asmA gene, dcd gene, udk gene, thiD gene, thiM gene, mrp gene, metG gene, dusC gene, cdd gene, sanA gene, mglC gene, mglA gene, mglB gene, galS gene, folE gene, cirA gene, lysP gene, nfo gene, fruA gene, fruK gene, fruB gene, setB gene, spr gene, rtn gene, bcr gene, rsuA gene, rplY gene, proL gene, narP gene, ccmH gene, ccmG gene, ccmF gene, ccmE gene, ccmD gene, ccmC gene, ccmB gene, ccmA gene, napC gene, napB gene, napH gene, napG gene, napA gene, napD gene, napF gene, eco gene, mqo gene, alkB gene, ada gene, ompC gene, micF gene, rcsD gene, rcsB gene, rcsC gene, atoS gene, atoC gene, atoD gene, atoA gene, atoE gene, atoB gene, gyrA gene, ubiG gene, nrdA gene, nrdB gene, inaA gene, glpQ gene, glpT gene, glpA gene, glpB gene, glpC gene, ais gene, arnT gene, pmrD gene, menE gene, menC gene, menB gene, menD gene, menF gene, nuoN gene, nuoM gene, nuoL gene, nuoK gene, nuoJ gene, nuoI gene, nuoH gene, nuoG gene, nuoF gene, nuoE gene, nuoC gene, nuoB gene, nuoA gene, lrhA gene, ackA gene, pta gene, ubiX gene, purF gene, cvpA gene, dedD gene, folC gene, accD gene, dedA gene, truA gene, usg gene, pdxB gene, flk gene, fabB gene, trmC gene, mepA gene, aroC gene, prmB gene, sixA gene, fadL gene, vacJ gene, argW gene, dsdC gene, dsdX gene, dsdA gene, emrY gene, emrK gene, evgA gene, evgS gene, oxc gene, frc gene, ddg gene, glk gene, mntH gene, nupC gene, alaX gene, alaW gene, gltX gene, valU gene, valX gene, valY gene, lysV gene, xapR gene, xapB gene, xapA gene, ligA gene, zipA gene, cysZ gene, cysK gene, ptsH gene, ptsI gene, crr gene, pdxK gene, cysM gene, cysA gene, cysW gene, cysU gene, cysP gene, ucpA gene, murP gene, amiA gene, hemF gene, eutL gene, eutC gene, eutB gene, eutA gene, eutH gene, eutG gene, eutJ gene, eutE gene, cchB gene, cchA gene, eutI gene, eutT gene, eutQ gene, eutP gene, maeB gene, talA gene, tktB gene, aegA gene, narQ gene, acrD gene, dapE gene, purC gene, nlpB gene, dapA gene, gcvR gene, bcp gene, hda gene, uraA gene, upp gene, purM gene, purN gene, ppk gene, ppx gene, guaA gene, guaB gene, xseA gene, der gene, hisS gene, ispG gene, ndk gene, pbpC gene, sseA gene, ryfA gene, sseB gene, pepB gene, fdx gene, hscA gene, hscB gene, iscA gene, iscU gene, iscS gene, iscR gene, suhB gene, csiE gene, hcaT gene, hcaR gene, hcaE gene, hcaF gene, hcaC gene, hcaB gene, hcaD gene, glyA gene, hmp gene, glnB gene, sroF gene, purL gene, tadA gene, acpS gene, pdxJ gene, recO gene, era gene, me gene, lepB gene, lepA gene, rseC gene, rseB gene, rseA gene, rpoE gene, nadB gene, srmB gene, ung gene, trxC gene, pssA gene, kgtP gene, rrfG gene, rrlG gene, gltW gene, rrsG gene, clpB gene, rluD gene, pheL gene, pheA gene, tyrA gene, aroF gene, rplS gene, trmD gene, rimM gene, rpsP gene, ffh gene, grpE gene, recN gene, smpA gene, smpB gene, ssrA gene, gabD gene, gabT gene, gabP gene, nrdF gene, mprA gene, emrA gene, emrB gene, luxS gene, sraD gene, gshA gene, argQ gene, argZ gene, argY gene, argV gene, serV gene, csrA gene, alaS gene, recX gene, recA gene, mltB gene, norR gene, norV gene, norW gene, hypF gene, hydN gene, ascG gene, ascF gene, ascB gene, hycI gene, hycH gene, hycG gene, hycF gene, hycE gene, hycD gene, hycC gene, hycB gene, hycA gene, hypA gene, hypB gene, hypC gene, hypD gene, hypE gene, fhlA gene, mutS gene, pphB gene, rpoS gene, nlpD gene, pcm gene, surE gene, truD gene, ispF gene, ispD gene, ftsB gene, cysC gene, cysN gene, cysD gene, iap gene, cysH gene, cysI gene, cysJ gene, eno gene, pyrG gene, mazG gene, chpR gene, relA gene, rumA gene, barA gene, gudD gene, gudX gene, gudP gene, mitA gene, metZ gene, metW gene, metV gene, amiC gene, argA gene, recD gene, recB gene, ptr gene, recC gene, ppdC gene, ppdB gene, ppdA gene, thyA gene, lgt gene, ptsP gene, nudH gene, mutH gene, tas gene, aas gene, rygA gene, rygB gene, galR gene, lysA gene, lysR gene, araE gene, kduD gene, kduI gene, lysS gene, prfB gene, recJ gene, dsbC gene, xerD gene, fldB gene, bglA gene, gcvP gene, gcvH gene, gcvT gene, visC gene, ubiH gene, pepP gene, zapA gene, ssrS gene, rygC gene, serA gene, rpiA gene, argP gene, argK gene, argO gene, mscS gene, fbaA gene, pgk gene, epd gene, tktA gene, speB gene, speA gene, metK gene, galP gene, sprT gene, endA gene, gshB gene, ansB gene, mutY gene, mltC gene, nupG gene, speC gene, pheV gene, pitB gene, gss gene, hybG gene, hybF gene, hybE gene, hybD gene, hybC gene, hybB gene, hybA gene, hybO gene, exbD gene, exbB gene, metC gene, dkgA gene, sufI gene, plsC gene, parC gene, parE gene, cpdA gene, nudF gene, tolC gene, zupT gene, ribB gene, glgS gene, rygD gene, rfaE gene, glnE gene, htrG gene, cca gene, bacA gene, folB gene, ttdA gene, ttdB gene, rpsU gene, dnaG gene, rpoD gene, ileX gene, aer gene, ebgR gene, ebgA gene, ebgC gene, uxaA gene, uxaC gene, exuT gene, exuR gene, tdcG gene, tdcF gene, tdcE gene, tdcD gene, tdcC gene, tdcB gene, tdcA gene, tdcR gene, rnpB gene, garK gene, garR gene, garL gene, garP gene, garD gene, sohA gene, agaR gene, kbaZ gene, agaV gene, agaW gene, agaA gene, agaS gene, kbaY gene, agaB gene, agaC gene, agaD gene, agaI gene, mtr gene, deaD gene, nlpI gene, pnp gene, sraG gene, rpsO gene, truB gene, rbfA gene, infB gene, nusA gene, metY gene, argG gene, leuU gene, secG gene, glmM gene, folP gene, ftsH gene, rrmJ gene, greA gene, dacB gene, obgE gene, rpmA gene, rplU gene, ispB gene, sfsB gene, murA gene, kdsD gene, kdsC gene, rpoN gene, ptsN gene, npr gene, mtgA gene, elbB gene, ryhA gene, arcB gene, gltB gene, gltD gene, nanT gene, nanA gene, nanR gene, dcuD gene, sspB gene, sspA gene, rpsI gene, rplM gene, degQ gene, degS gene, mdh gene, argR gene, aaeB gene, aaeA gene, aaeX gene, aaeR gene, tldD gene, rng gene, mreD gene, mreC gene, mreB gene, accB gene, accC gene, panF gene, prmA gene, dusB gene, fis gene, rrfF gene, thrV gene, rrfD gene, rrlD gene, gltV gene, rrsD gene, purH gene, purD gene, zraR gene, zraS gene, zraP gene, hupA gene, nfi gene, hemE gene, nudC gene, rsd gene, thiC gene, thiE gene, thiF gene, thiS gene, thiG gene, thiH gene, htrC gene, rpoC gene, rpoB gene, rplL gene, rplJ gene, rplA gene, rplK gene, nusG gene, secE gene, tufB gene, thrT gene, glyT gene, tyrU gene, thrU gene, coaA gene, birA gene, murB gene, rrfB gene, rrlB gene, gltT gene, rrsB gene, murI gene, btuB gene, trmA gene, fabR gene, sthA gene, oxyR gene, oxyS gene, argH gene, argB gene, argC gene, argE gene, ppc gene, fsaB gene, gldA gene, katG gene, metF gene, metL gene, metB gene, metJ gene, rpmE gene, priA gene, cytR gene, ftsN gene, hslV gene, hslU gene, menA gene, rraA gene, glpF gene, glpK gene, glpX gene, fpr gene, tpiA gene, cdh gene, sbp gene, pfkA gene, fieF gene, cpxP gene, cpxR gene, cpxA gene, kdgT gene, sodA gene, fdhD gene, fdoG gene, fdoH gene, fdoI gene, fdhE gene, bipA gene, ginA gene, glnL gene, glnG gene, hemN gene, csrC gene, spf gene, polA gene, dsbA gene, mobA gene, mobB gene, rrfA gene, rrlA gene, alaT gene, ileT gene, rrsA gene, hemG gene, trkH gene, pepQ gene, fadB gene, fadA gene, fre gene, ubiD gene, rfaH gene, tatD gene, tatC gene, tatB gene, tatA gene, ubiB gene, ubiE gene, rmuC gene, udp gene, metE gene, metR gene, pldB gene, rhtB gene, rhtC gene, recQ gene, pldA gene, rarD gene, corA gene, uvrD gene, xerC gene, dapF gene, cyaY gene, cyaA gene, hemC gene, hemD gene, hemX gene, hemY gene, ryiA gene, aslA gene, aslB gene, proM gene, leuT gene, hisR gene, argX gene, rffM gene, wzyE gene, rffT gene, wzxE gene, rffA gene, rffC gene, rffH gene, rffG gene, rffD gene, rffE gene, wzzE gene, rfe gene, rho gene, rhoL gene, trxA gene, rhlB gene, gpp gene, rep gene, ppiC gene, ilvC gene, ilvY gene, ilvA gene, ilvD gene, ilvE gene, ilvM gene, ilvG_{—}2 gene, ilvG_{—}1 gene, ilvL gene, hdfR gene, trpT gene, aspT gene, rrfC gene, rrlC gene, gltU gene, rrsC gene, asnC gene, mioC gene, oriC gene, gidA gene, gidB gene, atpI gene, atpB gene, atpE gene, atpF gene, atpH gene, atpA gene, atpG gene, atpD gene, atpC gene, glmU gene, glmS gene, pstS gene, pstC gene, pstA gene, pstB gene, phoU gene, bglG gene, bglF gene, bglB gene, bglH gene, cbrC gene, mdtL gene, tnaB gene, tnaA gene, tnaC gene, trmE gene, rnpA gene, rpmH gene, dnaA gene, dnaN gene, recF gene, gyrB gene, ibpA gene, ibpB gene, emrD gene, ivbL gene, ilvB gene, ilvN gene, uhpA gene, uhpB gene, uhpC gene, uhpT gene, selC gene, gltS gene, recG gene, trmH gene, spoT gene, rpoZ gene, gmk gene, ligB gene, dinD gene, rph gene, pyrE gene, ttk gene, dut gene, dfp gene, rpmB gene, rpmG gene, mutM gene, coaD gene, kdtA gene, rfaQ gene, rfaG gene, rfaP gene, rfaS gene, rfaB gene, rfaI gene, rfaJ gene, rfaY gene, rfaZ gene, rfaK gene, rfaL gene, rfaC gene, rfaF gene, rfaD gene, htrL gene, kbl gene, tdh gene, envC gene, gpmI gene, grxC gene, secB gene, gpsA gene, cysE gene, lldD gene, lldR gene, lldP gene, mtlR gene, mtlD gene, mtlA gene, selA gene, selB gene, aldB gene, sgbE gene, sgbU gene, sgbH gene, lyxK gene, avtA gene, malS gene, bax gene, xylR gene, xylH gene, xylG gene, xylF gene, xylA gene, xylB gene, glyQ gene, glyS gene, hokA gene, cspA gene, tiaE gene, bisC gene, tag gene, eptB gene, proK gene, dppA gene, dppB gene, dppC gene, dppD gene, dppF gene, rdlD gene, ldrD gene, bcsG gene, bcsF gene, bcsE gene, bcsA gene, bcsB gene, bcsZ gene, bcsC gene, dctA gene, kdgK gene, treF gene, gadA gene, gadX gene, gadY gene, gadW gene, mdtF gene, mdtE gene, gadE gene, hdeD gene, hdeA gene, hdeB gene, slp gene, arsC gene, arsB gene, arsR gene, gor gene, prlC gene, uspA gene, pitA gene, nikR gene, nikE gene, nikD gene, nikC gene, nikB gene, nikA gene, acpT gene, dcrB gene, zntA gene, ftsY gene, ftsE gene, ftsX gene, rpoH gene, livJ gene, livK gene, livH gene, livM gene, livG gene, livF gene, ugpB gene, ugpA gene, ugpE gene, ugpC gene, ugpQ gene, ggt gene, gntR gene, gntK gene, gntU gene, asd gene, glgB gene, glgX gene, glgC gene, glgA gene, glgP gene, glpD gene, glpE gene, glpG gene, glpR gene, rtcR gene, rtcB gene, rtcA gene, malT gene, malP gene, malQ gene, gntT gene, gntY gene, gntX gene, bioH gene, feoB gene, feoA gene, greB gene, ompR gene, envZ gene, pck gene, hslO gene, hslR gene, nudE gene, mrcA gene, hofQ gene, aroK gene, aroB gene, damX gene, dam gene, rpe gene, gph gene, trpS gene, cysG gene, nirC gene, nirD gene, nirB gene, tsgA gene, ppiA gene, fic gene, pabA gene, argD gene, crp gene, prkB gene, kefG gene, kefB gene, slyD gene, slyX gene, fkpA gene, rpsL gene, rpsG gene, fusA gene, tufA gene, rpsJ gene, rplC gene, rplD gene, rplW gene, rplB gene, rpsS gene, rplV gene, rpsC gene, rplP gene, rpmC gene, rpsQ gene, rplN gene, rplX gene, rplE gene, rpsN gene, rpsH gene, rplF gene, rplR gene, rpsE gene, rpmD gene, rplO gene, secY gene, rpmJ gene, rpsM gene, rpsK gene, rpsD gene, rpoA gene, rplQ gene, zntR gene, mscL gene, trkA gene, rsmB gene, fmt gene, def gene, smf gene, smg gene, aroE gene, rrsE gene, ileU gene, alaU gene, rrlE gene, rrfE gene, metA gene, aceB gene, aceA gene, aceK gene, arpA gene, iclR gene, metH gene, pepE gene, lysC gene, pgi gene, ubiC gene, ubiA gene, plsB gene, dgkA gene, lexA gene, dinF gene, zur gene, qor gene, dnaB gene, air gene, tyrB gene, aphA gene, uvrA gene, ssb gene, soxS gene, soxR gene, ryjA gene, actP gene, acs gene, nrfA gene, nrfB gene, nrfC gene, nrfD gene, nrfE gene, nrfF gene, nrfG gene, gltP gene, fdhF gene, rpiR gene, rpiB gene, proP gene, basS gene, basR gene, eptA gene, adiC gene, adiY gene, adiA gene, melR gene, melA gene, melB gene, fumB gene, dcuB gene, dcuR gene, dcuS gene, lysU gene, cadA gene, cadB gene, cadC gene, pheU gene, dipZ gene, cutA gene, dcuA gene, aspA gene, fxsA gene, groS gene, groL gene, efp gene, ecnA gene, ecnB gene, sugE gene, blc gene, ampC gene, frdD gene, frdC gene, frdB gene, frdA gene, poxA gene, psd gene, rsgA gene, orn gene, glyV gene, glyX gene, glyY gene, amiB gene, mutL gene, miaA gene, hfq gene, hflX gene, hflK gene, hflC gene, purA gene, rnr gene, rlmB gene, ulaF gene, rpsF gene, priB gene, rpsR gene, rplI gene, fklB gene, cycA gene, cpdB gene, cysQ gene, msrA gene, chpS gene, chpB gene, ppa gene, fbp gene, mpl gene, pmbA gene, cybC gene, nrdG gene, nrdD gene, treC gene, treB gene, treR gene, mgtA gene, pyrI gene, pyrB gene, pyrL gene, argI gene, valS gene, holC gene, pepA gene, idnR gene, idnT gene, idnO gene, idnD gene, idnK gene, leuX gene, dnaC gene, dnaT gene, bglJ gene, fhuF gene, leuV gene, leuP gene, leuQ gene, rsmC gene, holD gene, rimI gene, prfC gene, osmY gene, deoC gene, deoA gene, deoB gene, deoD gene, lplA gene, serB gene, radA gene, nadR gene, slt gene, trpR gene, rob gene, creA gene, creB gene, creC gene, creD gene, arcA gene;
[2] fhuA gene, fhuC gene, fhuD gene, fhuB gene, yafJ gene, yafK gene, yafQ gene, dinJ gene, yafL gene, yafM gene, fhiA gene, mbhA gene, dinB gene, yafN gene, yafO gene, yafP gene, ykfJ gene, prfH gene, yagP gene, yagQ gene, yagR gene, yagS gene, yagT gene, yagU gene, ykgJ gene, yagV gene, yagW gene, yagX gene, yagY gene, yagZ gene, ykgK gene, ykgL gene, ykgM(JW5034) gene, ykgM(JW5035) gene, eaeH gene, ykgA gene, ykgB gene, ykgI gene, ykgC gene, ykgD gene, ykgE gene, ykgF gene, ykgG gene, ykgH gene, betA gene, betB gene, betI gene, betT gene, yahA gene, yahB gene, yahC gene, yahD gene, yahE gene, yahF gene, yahG gene, yahH gene, yahI gene, yahJ gene, yahK gene, yahL gene, yahM gene, yahN gene, yahO gene, prpR gene, prpB gene, prpC gene, prpD gene, prpE gene, codB gene, codA gene, cynR gene, cynT gene, cynS gene, cynX gene, lacA gene, lacY gene, lacZ gene, lacI gene, mhpR gene, mhpA gene, mhpB gene, mhpC gene, mhpD gene, mhpF gene, mhpE gene, mhpT gene, yaiL gene, frmB gene, frmA gene, frmR gene, yaiO gene, yaiX gene, yaiF gene, yaiP gene, yaiS gene, tauA gene, tauB gene, tauC gene, tauD gene, yaiT gene, yaiU gene, yaiV gene, ampH gene, sbmA gene, yaiW gene, yaiY gene, yaiZ gene, ddlA gene, yaiB gene, phoA gene, psiF gene, yaiC gene, ybbO gene, tesA gene, ybbA gene, ybbP gene, ylbG gene, ybbB gene, ybbS gene, allA gene, allR gene, glxR gene, ybbV gene, ybbW gene, allB gene, ybbY gene, glxK gene, ylbA gene, allC gene, allD gene, fdrA gene, ylbE_{—}1 gene, ylbE_{—}2 gene, ylbF gene, ybcF gene, envY gene, ybcH gene, nfrA gene, nfrB gene, cusS gene, cusR gene, cusC gene, cusF gene, cusB gene, cusA gene, pheP gene, ybdG gene, nfnB gene, ybdF gene, ybdJ gene, ybdK gene, hokE gene, ybeL gene, ybeQ gene, ybeR gene, djlB gene, ybeT gene, ybeU gene, djlC gene, hscC gene, rihA gene, gltL gene, gltK gene, gltJ gene, gltI gene, kdpF gene, ybfA gene, ybgA gene, phr gene, ybiA gene, dinG gene, ybiB gene, ybiC gene, ybiJ gene, ybiI gene, ybiX gene, fiu gene, ybiM gene, ybiN gene, ybiO gene, glnQ gene, glnP gene, glnH gene, yliA gene, yliB gene, yliC gene, yliD gene, yliE gene, yliF gene, yliG gene, yliH gene, yliI gene, yliJ gene, dacC gene, deoR gene, ybjG gene, ybjC gene, nfsA gene, rimK gene, ybjN gene, potF gene, potG gene, potH gene, potI gene, ybjO gene, rumB gene, artJ gene, artM gene, artQ gene, artI gene, artP gene, ybjP gene, ybjQ gene, ybjR gene, ybjS gene, ybjT gene, ltaE gene, ymcC gene, ymcD gene, cspH gene, cspG gene, ymcE gene, gnsA gene, yccM gene, torS gene, torT gene, torR gene, torC gene, torA gene, torD gene, cbpM gene, cbpA gene, yccE gene, agp gene, yccJ gene, wrbA gene, ymdF gene, ycdG gene, ycdH gene, ycdI gene, rarA gene, ycdK gene, ycdL gene, ycdM gene, ycdC gene, putA gene, putP gene, ycdN_{—}1 gene, ycdN_{—}2 gene, ycdO gene, ycdB gene, phoH gene, ycdP gene, ycdQ gene, ycdR gene, ycdS gene, ycdT gene, ymdE gene, ycdU gene, elbA gene, ycgX gene, ycgE gene, ycgF gene, ycgZ gene, ymgA gene, ymgB gene, ymgC gene, ycgG gene, ymgF gene, ycgH_{—}1 gene, ycgH_{—}2 gene, ymgD gene, ymgG gene, ymgH gene, ycgI gene, ydfH gene, ydfZ gene, ydfI gene, ydfJ gene, yecT gene, flhE gene, flhA gene, flhB gene, cheZ gene, cheY gene, cheB gene, cheR gene, tap gene, tar gene, cheW gene, cheA gene, motB gene, motA gene, flhC gene, flhD gene, yecG gene, otsA gene, otsB gene, araH gene, araG gene, araF gene, yecI gene, yecJ gene, isrB gene, yecR gene, ftn gene, yecH gene, tyrP gene, uvrC gene, uvrY gene, yecF gene, sdiA gene, yecC gene, yecS gene, yedO gene, fliY gene, fliZ gene, fliA gene, fliC gene, fliD gene, fliS gene, fliT gene, amyA gene, yedD gene, yedE gene, yedF gene, yedK gene, yedL gene, yedN_{—}2 gene, yedN_{—}1 gene, yedM gene, intG gene, fliE gene, fliF gene, fliG gene, fliH gene, fliI gene, fliJ gene, fliK gene, fliL gene, fliM gene, fliN gene, fliO gene, flip gene, fliQ gene, fliR gene, rcsA gene, dsrB gene, yodD gene, yedA gene, vsr gene, dcm gene, yedJ gene, yedR gene, yedS_{—}1 gene, yedS_{—}2 gene, yedS_{—}3 gene, hchA gene, yedV gene, yedW gene, yedX gene, yedY gene, yedZ gene, yodA gene, wbbL_{—}2 gene, wbbL_{—}1 gene, wbbK gene, wbbJ gene, wbbI gene, wbbH gene, glf gene, rfbX gene, rfbC gene, rfbA gene, rfbD gene, rfbB gene, yegE gene, alkA gene, yegD gene, yegI gene, yegJ gene, yegK gene, yegL gene, ryeC gene, ryeD gene, mdtA gene, mdtB gene, mdtC gene, mdtD gene, baeS gene, baeR gene, yegP gene, yegQ gene, ryeE gene, ogrK gene, yegZ gene, yegR gene, yegS gene, gatR_{—}1 gene, gatR_{—}2 gene, gatD gene, gatC gene, gatB gene, gatA gene, gatZ gene, gatY gene, fbaB gene, yegT gene, yegU gene, yegV gene, yegW gene, yegX gene, molR_{—}1 gene, molR_{—}2 gene, molR_{—}3 gene, yehI gene, yehK gene, yehL gene, yehM gene, yehP gene, yehQ gene, yehR gene, yehS gene, yehT gene, yehU gene, mlrA gene, yohO gene, yehW gene, yehX gene, yehY gene, yehZ gene, bglX gene, did gene, pbpG gene, yohC gene, yelI gene, yeiJ gene, rihB gene, yeiL gene, yeiM gene, yeiN gene, yeiC gene, elaB gene, elaA gene, elaC gene, elaD gene, yfbK gene, yfbL gene, yfbM gene, yfbN gene, yfbO gene, yfbP gene, yfcC gene, yfcD gene, yfcE gene, yfcF gene, yfcG gene, folX gene, yfcH gene, yfcI gene, hisP gene, hisM gene, hisQ gene, hisJ gene, argT gene, ypdA gene, ypdB gene, ypdC gene, ypdD gene, ypdE gene, ypdF gene, ypdG gene, ypdH gene, pinH gene, ypjB gene, ypjC gene, ileY gene, ygaQ gene, ygaR gene, yqaC gene, yqaD gene, ygaT gene, csiR gene, ygaU gene, yqaE gene, ygaV gene, ygaP gene, stpA gene, ygaW gene, ygaC gene, ygaM gene, nrdH gene, nrdI gene, nrdE gene, proV gene, proW gene, proX gene, ygaX gene, ygaY gene, ygaZ gene, ygaH gene, srlA gene, srlE gene, srlB gene, srlD gene, gutM gene, srlR gene, gutQ gene, yqeG gene, yqeH gene, yqeI gene, yqeJ gene, yqeK gene, ygeF gene, ygeG gene, ygeH gene, ygeI gene, pbl gene, ygeK gene, ygeL gene, ygeM gene, ygeN gene, ygeO gene, ygeP gene, ygeQ gene, glyU gene, ygeR gene, xdhA gene, xdhB gene, xdhC gene, ygeV gene, ygeW gene, ygeX gene, ygeY gene, hyuA gene, yqeA gene, yqeB gene, yqeC gene, ygfJ gene, ygfK gene, ssnA gene, ygfM gene, xdhD gene, ygfO gene, guaD gene, ygfQ gene, ygfS gene, ygfT gene, ygfU gene, idi gene, cmtA gene, cmtB gene, yghD gene, yghE gene, yghF gene, yghG gene, pppA gene, yghJ gene, yghK gene, glcB gene, glcG gene, glcF gene, glcE gene, glcD gene, glcC gene, yghO gene, yghQ gene, yghR gene, yghS gene, yghT gene, ygiS gene, ygiT gene, ygiU gene, ygiV gene, ygiW gene, qseB gene, qseC gene, ygiZ gene, mdaB gene, ygiN gene, gltF gene, yhcA gene, yhcD gene, yhcE gene, yhcF gene, yhcG gene, yhcH gene, nanK gene, nanE gene, yhdJ gene, yhdU gene, envR gene, acrE gene, acrF gene, yhdV gene, yhdW gene, yhdX gene, yhdY gene, yijP gene, yijO gene, frwD gene, pflC gene, pflD gene, frwB gene, frwC gene, ptsA gene, rhaT gene, rhaR gene, rhaS gene, rhaB gene, rhaA gene, rhaD gene, yiiL gene, frvA gene, frvB gene, frvX gene, frvR gene, yiiG gene, yiiF gene, yiiE gene, yiiD gene, dtd gene, rbn gene, yihX gene, yihW gene, yihV gene, yihU gene, yihT gene, yihS gene, yihR gene, yihQ gene, yihP gene, yihO gene, ompL gene, yihN gene, yihM gene, yihL gene, hsrA gene, rbsR gene, rbsK gene, rbsB gene, rbsC gene, rbsA gene, rbsD gene, trkD gene, yieN gene, yieM gene, asnA gene, yidB gene, yidA gene, yidX gene, dgoR gene, dgoK gene, dgoA gene, dgoD gene, dgoT gene, cbrA gene, yidR gene, yidQ gene, yidE gene, yidP gene, glvC gene, glvB gene, glvG gene, ysdC gene, yidL gene, yidK gene, yidJ gene, yidI gene, yidH gene, yidG gene, yidF gene, yhiN gene, yhiM gene, yhiL gene, yhiK gene, yhiJ gene, yhiI gene, rbbA gene, yhhJ gene, chiA gene, bfd gene, bfr gene, gspO gene, gspM gene, gspL gene, gspK gene, gspJ gene, gspI gene, gspH gene, gspG gene, gspF gene, gspE gene, gspD gene, gspC gene, gspA gene, pioO gene, yjbE gene, yjbF gene, yjbG gene, yjbH gene, yjbA gene, xylE gene, malG gene, malF gene, malE gene, malK gene, lamB gene, malM gene, yjbI gene, yjcP gene, yjcQ gene, yjcR gene, yjcS gene, alsK gene, alsE gene, alsC gene, alsA gene, alsB gene, yjdP gene, phnP gene, phnO gene, phnN gene, phnM gene, phnL gene, phnK gene, phnJ gene, phnI gene, phnH gene, phnG gene, phnF gene, phnE(JW4064) gene, phnE(JW4065) gene, phnD gene, phnC gene, phnB gene, phnA gene, yjdA gene, yjcZ gene, yjfI gene, yjfJ gene, yjfK gene, yjfL gene, yjfM gene, yjfC gene, aidB gene, yjfN gene, yjfO gene, yjfP gene, ulaR gene, ulaG gene, ulaA gene, ulaB gene, ulaC gene, ulaD gene, ulaE gene, yjhS gene, yjhT gene, yjhA gene, fimB gene, fimE gene, fimA gene, fimI gene, fimC gene, fimD gene, fimF gene, fimG gene, fimH gene, gntP gene, uxuA gene, uxuB gene, uxuR gene, yjiC gene, yjiD gene, yjiE gene, iadA gene, yjiG gene, yjiH gene, kptA gene, yjiJ gene, yjiK gene, yjiL gene, yjiM gene, yjiN gene, yjiO gene, yjiP gene, yjiQ gene, yjiR gene, yjiS gene, yjiT gene, yjiV gene, mcrC gene, mcrB gene, yjiW gene, hsdS gene, hsdM gene, hsdR gene, mrr gene, yjiA gene, yjiX gene, yjiY gene, tsr gene, yjiZ gene, yjjM gene, yjjN gene, mdoB gene, yjjA gene; and
[3] chpA gene, uspG gene, ybdR gene, rnk gene, ma gene, citT gene, citG gene, citX gene, citF gene, citE gene, citD gene, citC gene, citA gene, citB gene, dcuC gene, crcA gene, cspE gene, crcB gene, ybeH gene, ybeM gene, yqcA gene, yqcB gene, yqcC gene, syd gene, yqcD gene, ygdH gene, sdaC gene, sdaB gene, exo gene, fucO gene, fucA gene, fucP gene, fucI gene, fucK gene, fucU gene, fucR gene, ygdE gene, ygdD gene, gcvA gene, ygdI gene, csdA gene, ygdK gene, araD gene, araA gene, araB gene, araC gene, yabI gene, thiQ gene, thiP gene, tbpA gene, sgrR gene, setA gene, yhfZ gene, yhfY gene, yhfX gene, yhfW gene, php gene, yhfU gene, yhfT gene, yhfS gene, frlR gene, frlD gene, frlC gene, frlB gene, frlA gene, yhfL gene, pncA gene, ydjE gene, ydjF gene, ydjG gene, ydjH gene, ydjI gene, ydjJ gene, ydjK gene, ydjL gene, yeaC gene, yeaA gene, ade gene, yicO gene, yicN gene, yicM gene, yicS gene, nlpA gene, yicL gene, setC gene, ygjI gene, ygjJ gene, ygjK gene, fadH gene, ygjM gene, ygjN gene, ygjO gene, ygjP gene, ygjQ gene, ygjR gene, alx gene, sstT gene, ygjV gene, yrhB gene, yrhA gene, yhhZ gene, yhhY gene, yhhX gene, yhhW gene, yeaK gene, yoaI gene, yeaL gene, yeaM gene, yeaN gene, yeaO gene, yoaF gene, yeaP gene, yeaQ gene, yoaG gene, yeaR gene, yeaS gene, yeaT gene, yeaU gene, yeaV gene, yeaW gene, yeaX gene, hyfA gene, hyfB gene, hyfC gene, hyfD gene, hyfE gene, hyfF gene, hyfG gene, hyfH gene, hyfI gene, hyfJ gene, hyfR gene, and focB gene.

24. The E. coli mutant strain obtained via modification of the E. coli mutant strain according to claim 1, by a method selected from among the following [1] to [5]:
[1] a method for reducing or removing at least one mechanism for regulating biosynthesis of the useful substance;
[2] a method for increasing the expression of at least one enzyme associated with biosynthesis of the useful substance;
[3] a method for increasing the copy number of at least one enzyme gene associated with biosynthesis of the useful substance;
[4] a method for attenuating or blocking at least one metabolic pathway which branches from the biosynthetic pathway of the useful substance into metabolites other than the useful substance; or
[5] a method for selecting a strain that exhibits higher resistance to an analogue of a useful substance than a wild-type E. coli strain.

25. The E. coli mutant strain according to claim 1, wherein the E. coli strain is the E. coli K-12, B, or W strain.

26. The E. coli mutant strain according to claim 25, wherein the E. coli K-12 strain is the E. coli W3110 strain (ATCC27325) or the E. coli MG1655 strain (ATCC47076).

27. A method for producing a useful substance comprising culturing the E. coli mutant strain according to claim 1, in a medium so as to generate and accumulate the useful substance in the culture and recovering the useful substance from the culture.

28. The method according to claim 27, wherein the useful substance is selected from the group consisting of proteins, amino acids, nucleic acids, vitamins, saccharides, organic acids, and lipids.

29. The E. coli mutant strain obtained via modification of the E. coli mutant strain according to claim 23, by a method selected from among the following [1] to [5]:
[1] a method for reducing or removing at least one mechanism for regulating biosynthesis of the useful substance;
[2] a method for increasing the expression of at least one enzyme associated with biosynthesis of the useful substance;
[3] a method for increasing the copy number of at least one enzyme gene associated with biosynthesis of the useful substance;
[4] a method for attenuating or blocking at least one metabolic pathway which branches from the biosynthetic pathway of the useful substance into metabolites other than the useful substance; or
[5] a method for selecting a strain that exhibits higher resistance to an analogue of a useful substance than a wild-type E. coli strain.

30. The E. coli mutant strain according to claim 23, wherein the E. coli strain is the E. coli K-12, B, or W strain.

31. The E. coli mutant strain according to claim 30, wherein the E. coli K-12 strain is the E. coli W3110 strain (ATCC27325) or the E. coli MG1655 strain (ATCC47076).

32. A method for producing a useful substance comprising culturing the E. coli mutant strain according to claim 23, in a medium so as to generate and accumulate the useful substance in the culture and recovering the useful substance from the culture.

33. The method according to claim 32, wherein the useful substance is selected from the group consisting of proteins, amino acids, nucleic acids, vitamins, saccharides, organic acids, and lipids.

The application's sequence listing, which the Patent Office published only in electronic form, follows.

SEQUENCE LISTING (1 sequence)

SEQ ID NO: 1 - DNA, 4646332 bp, Escherichia coli W3110 (residues 1-1,548,778 of 4,646,332)
agcttttcattctgactgcaacgggcaatatgtctctgtgtggattaaaaaaagagtgtctgatagcagcttctgaactggttacctgccgtgagtaaattaaaattttattgacttaggtcactaaatactttaaccaatataggcatagcgcacagacagataaaaattacagagtacacaacatccatgaaacgcattagcaccaccattaccaccaccatcaccattaccacaggtaacggtgcgggctgacgcgtacaggaaacacagaaaaaagcccgcacctgacagtgcgggctttttttttcgaccaaaggtaacgaggtaacaaccatgcgagtgttgaagttcggcggtacatcagtggcaaatgcagaacgttttctgcgtgttgccgatattctggaaagcaatgccaggcaggggcaggtggccaccgtcctctctgcccccgccaaaatcaccaaccacctggtggcgatgattgaaaaaaccattagcggccaggatgctttacccaatatcagcgatgccgaacgtatttttgccgaacttttgacgggactcgccgccgcccagccggggttcccgctggcgcaattgaaaactttcgtcgatcaggaatttgcccaaataaaacatgtcctgcatggcattagtttgttggggcagtgcccggatagcatcaacgctgcgctgatttgccgtggcgagaaaatgtcgatcgccattatggccggcgtattagaagcgcgcggtcacaacgttactgttatcgatccggtcgaaaaactgctggcagtggggcattacctcgaatctaccgtcgatattgctgagtccacccgccgtattgcggcaagccgcattccggctgatcacatggtgctgatggcaggtttcaccgccggtaatgaaaaaggcgaactggtggtgcttggacgcaacggttccgactactctgctgcggtgctggctgcctgtttacgcgccgattgttgcgagatttggacggacgttgacggggtctatacctgcgacccgcgtcaggtgcccgatgcgaggttgttgaagtcgatgtcctaccaggaagcgatggagctttcctacttcggcgctaaagttcttcacccccgcaccattacccccatcgcccagttccagatcccttgcctgattaaaaataccggaaatcctcaagcaccaggtacgctcattggtgccagccgtgatgaagacgaattaccggtcaagggcatttccaatctgaataacatggcaatgttcagcgtttctggtccggggatgaaagggatggtcggcatggcggcgcgcgtctttgcagcgatgtcacgcgcccgtatttccgtggtgctgattacgcaatcatcttccgaatacagcatcagtttctgcgttccacaaagcgactgtgtgcgagctgaacgggcaatgcaggaagagttctacctggaactgaaagaaggcttactggagccgctggcagtgacggaacggctggccattatctcggtggtaggtgatggtatgcgcaccttgcgtgggatctcggcgaaattctttgccgcactggcccgcgccaatatcaacattgtcgccattgctcagggatcttctgaacgctcaatctctgtcgtggtaaataacgatgatgcgaccactggcgtgcgcgttactcatcagatgctgttcaataccgatcaggttatcgaagtgtttgtgattggcgtcggtggcgttggcggtgcgctgctggagcaactgaagcgtcagcaaagctggctgaagaataaacatatcgacttacgtgtctgcggtgttgccaactcgaaggctctgctcaccaatgtacatggccttaatctggaaaactggcaggaagaactggcgcaagccaaagagccgtttaatctcgggcgcttaattcgcctcgtgaaagaatatcatctgctgaacccggtcattgttgactgcacttccagccaggcagtggcggatcaatatgccgacttcctgcgcgaaggtttccacgttgtcacgccgaacaaaaaggccaacacctcgtcgatggattactaccatcagttgcgttatgcggcggaaaaatcgcggcgtaaattcctctatgacaccaacgttggggctggattaccggttattgagaacctgcaaaatctgctcaatgcaggtgatgaattgatgaagttctccggcattctttctggttcgctttcttatatcttcggcaagttagacgaaggcatgagtttctccgaggcgaccacgctggcgcgggaaatgggttataccgaaccggacccgcgagatgatctttctggtatggatgtggcgcgtaaactattgattctcgctcgtgaaacgggacgtgaactggagctggcggatattgaaattgaacctgtgctgcccgcagagtttaacgccgagggtgatgttgccgcttttatggcgaatctgtcacaactcgacgatctctttgccgcgcgcgtggcgaaggcccgtgatgaaggaaaagttttgcgctatgttggcaatattgatgaagatggcgtctgccgcgtgaagattgccgaagtggatggtaatgatccgctgttcaaagtgaaaaatggcgaaaacgccctggccttctatagccactattatcagccgctgccgttggtactgcgcggatatggtgcgggcaatgacgttacagctgccggtgtctttgctgatctgctacgtaccctctcatggaagttaggagtctgacatggttaaagtttatgccccggcttccagtgccaatatgagcgtcgggtttgatgtgctcggggcggcggtgacacctgttgatggtgcattgctcggagatgtagtcacggttgaggcggcagagacattcagtctcaacaacctcggacgctttgccgataagctgccgtcagaaccacgggaaaatatcgtttatcagtgctgggagcgtttttgccaggaactgggtaagcaaattccagtggcgatgaccctggaaaagaatatgccgatcggttcgggcttaggctccagtgcctgttcggtggtcgcggcgctgatggcgatgaatgaacactgcggcaagccgcttaatgacactcgtttgctggctttgatgggcgagctggaaggccgtatctccggcagcattcattacgacaacgtggcaccgtgttttctcggtggtatgcagttgatgatcgaagaaaacgacatcatcagccagcaagtgccagggtttgatgagtggctgtgggtgctggcgtatccggggattaaagtctcgacggcagaagccagggctattttaccggcgcagtatcgccgccaggattgcattgcgcacgggcgacatctggcaggcttcattcacgcctgctattcccgtcagcctgagcttgccgcgaagctgatgaaagatgttatcgctgaaccctaccgtgaacggttactgccaggcttccggcaggcgcggcaggcggtcgcggaaatcggcgcggtagcgagcggtatctccggctccggcccgaccttgttcgctctgtgtgacaagccggaaaccgcccagcgcgttgccgactggttgggtaagaactacctgcaaaatcaggaaggttttgttcatatttgccggctggatacggcgggcgcacgagtactggaaaactaaatgaaactctacaatctgaaagatcacaacgagcaggtcagctttgcgcaagccgtaacccaggggttgggcaaaaatcaggggctgttttttccgcacgacctgccggaattcagcctgactgaaattgatgagatgctgaagctggattttgtcacccgcagtgcgaagatcctctcggcgtttattggtgatgaaatcccacaggaaatcctggaagagcgcgtgcgcgcggcgtttgccttcccggctccggtcgccaatgttgaaagcgatgtcggttgtctggaattgttccacgggccaacgctggcatttaaagatttcggcggtcgctttatggcacaaatgctgacccatattgcgggtgataagccagtgaccattctgaccgcgacctccggtgataccggagcggcagtggctcatgctttctacggtttaccgaatgtgaaagtggttatcctctatccacgaggcaaaatcagtccactgcaagaaaaactgttctgtacattgggcggcaatatcgaaactgttgccatcgacggcgatttcgatgcctgtcaggcgctggtgaagcaggcgtttgatgatgaagaactgaaagtggcgctagggttaaactcggctaactcgattaacatcagccgtttgctggcgcagatttgctactactttgaagctgttgcgcagctgccgcaggagacgcgcaaccagctggttgtctcggtgccaagcggaaacttcggcgatttgacggcgggtctgctggcgaagtcactcggtctgccggtgaaacgttttattgctgcgaccaacgtgaacgataccgtgccacgtttcctgcacgacggtcagtggtcacccaaagcgactcaggcgacgttatccaacgcgatggacgtgagtcagccgaacaactggccgcgtgtggaagagttgttccgccgcaaaatctggcaactgaaagagctgggttatgcagccgtggatgatgaaaccacgcaacagacaatgcgtgagttaaaagaactgggctacacttcggagccgcacgctgccgtagcttatcgtgcgctgcgtgatcagttgaatccaggcgaatatggcttgttcctcggcaccgcgcatccggcgaaatttaaagagagcgtggaagcgattctcggtgaaacgttggatctgccaaaagagctggcagaacgtgctgatttacccttgctttcacataatctgcccgccgattttgctgcgttgcgtaaattgatgatgaatcatcagtaaaatctattcattatctcaatcaggccgggtttgcttttatgcagcccggcttttttatgaagaaattatggagaaaaatgacagggaaaaaggagaaattctcaataaatgcggtaacttagagattaggattgcggagaataacaaccgccgttctcatcgagtaatctccggatatcgacccataacgggcaatgataaaaggagtaacctgtgaaaaagatgcaatctatcgtactcgcactttccctggttctggtcgctcccatggcagcacaggctgcggaaattacgttagtcccgtcagtaaaattacagataggcgatcgtgataatcgtggctattactgggatggaggtcactggcgcgaccacggctggtggaaacaacattatgaatggcgaggcaatcgctggcacctacacggaccgccgccaccgccgcgccaccataagaaagctcctcatgatcatcacggcggtcatggtccaggcaaacatcaccgctaaatgacaaatgccgggtaacaatccggcattcagcgcctgatgcgacgctggcgcgtcttatcaggcctacgttaattctgcaatatattgaatctgcatgcttttgtaggcaggataaggcgttcacgccgcatccggcattgactgcaaacttaacgctgctcgtagcgtttaaacaccagttcgccattgctggaggaatcttcatcaaagaagtaaccttcgctattaaaaccagtcagttgctctggtttggtcagccgattttcaataatgaaacgactcatcagaccgcgtgctttcttagcgtagaagctgatgatcttaaatttgccgttcttctcatcgaggaacaccggcttgataatctcggcattcaatttcttcggcttcaccgatttaaaatactcatctgacgccagattaatcaccacattatcgccttgtgctgcgagcgcctcgttcagcttgttggtgatgatatctccccagaattgatacagatctttccctcgggcattctcaagacggatccccatttccagacgataaggctgcattaaatcgagcgggcggagtacgccatacaagccggaaagcattcgcaaatgctgttgggcaaaatcgaaatcgtcttcgctgaaggtttcggcctgcaagccggtgtagacatcacctttaaacgccagaatcgcctggcgggcattcgccggcgtgaaatctggctgccagtcatgaaagcgagcggcgttgatacccgccagtttgtcgctgatgcgcatcagcgtgctaatctgcggaggcgtcagtttccgcgcctcatggatcaactgctgggaattgtctaacagctccggcagcgtatagcgcgtggtggtcaacgggctttggtaatcaagcgttttcgcaggtgaaataagaatcagcatatccagtccttgcaggaaatttatgccgactttagcaaaaaatgagaatgagttgatcgatagttgtgattactcctgcgaaacatcatcccacgcgtccggagaaagctggcgaccgatatccggataacgcaatggatcaaacaccgggcgcacgccgagtttacgctggcgtagataatcactggcaatggtatgaaccacaggcgagagcagtaaaatggcggtcaaattggtaatagccatgcaggccattatgatatctgccagttgccacatcagcggaaggcttagcaaggtgccgccgatgaccgttgcgaaggtgcagatccgcaaacaccagatcgctttagggttgttcaggcgtaaaaagaagagattgttttcggcataaatgtagttggcaacgatggagctgaaggcaaacagaataaccacaagggtaacaaactcagcaccccaggaacccattagcacccgcatcgccttctggataagctgaataccttccagcggcatgtaggttgtgccgttacccgccagtaatatcagcatggcgcttgccgtacagatgaccagggtgtcgataaaaatgccaatcatctggacaatcccttgcgctgccggatgcggaggccaggacgccgctgccgctgccgcgtttggcgtcgaacccattcccgcctcattggaaaacatactgcgctgaaaaccgttagtaatcgcctggcttaaggtatatcccgccgcgccgcctgccgcttcctgccagccaaaagcactctcaaaaatagaccaaatgacgtggggaagttgcccgatattcattacgcaaattaccaggctggtcagtacccagattatcgccatcaacgggacaaagccctgcatgagccgggcgacgccatgaagaccgcgagtgattgccagcagagtaaagacagcgagaataatgcctgtcaccagcgggggaaaatcaaaagaaaaactcagggcgcgggcaacggcgttcgcttgaactccgctgaaaattatgccataggcgatgagcaaaaagacggcgaacagaacgcccatccagcgcatccccagcccgcgcgccatataccatgccggtccgccacgaaactgcccattgacgtcacgttctttataaagttgtgccagagaacattcggcaaacgaggtcgccatgccgataaacgcggcaacccacatccaaaagacggctccaggtccaccggcggtaatagccagcgcaacgccggccaggttgccgctacccacgcgcgccgcaagactggtacacaatgactgaaatgaggttaaaccgcctggctgtggatgaatgctatttttaagacttttgccaaactggcggatgtagcgaaactgcacaaatccggtgcgaaaagtgaaccaacaacctgcgccgaagagcaggtaaatcattaccgatccccaaaggacgctgttaatgaaggagaaaaaatctggcatgcatatccctcttattgccggtcgcgatgactttcctgtgtaaacgttaccaattgtttaagaagtatatacgctacgaggtacttgataacttctgcgtagcatacatgaggttttgtataaaaatggcgggcgatatcaacgcagtgtcagaaatccgaaacagtctcgcctggcgataaccgtcttgtcggcggttgcgctgacgttgcgtcgtgatatcatcagggcagaccggttacatccccctaacaagctgtttaaagagaaatactatcatgacggacaaattgacctcccttcgtcagtacaccaccgtagtggccgacactggggacatcgcggcaatgaagctgtatcaaccgcaggatgccacaaccaacccttctctcattcttaacgcagcgcagattccggaataccgtaagttgattgatgatgctgtcgcctgggcgaaacagcagagcaacgatcgcgcgcagcagatcgtggacgcgaccgacaaactggcagtaaatattggtctggaaatcctgaaactggttccgggccgtatctcaactgaagttgatgcgcgtctttcctatgacaccgaagcgtcaattgcgaaagcaaaacgcctgatcaaactctacaacgatgctggtattagcaacgatcgtattctgatcaaactggcttctacctggcagggtatccgtgctgcagaacagctggaaaaagaaggcatcaactgtaacctgaccctgctgttctccttcgctcaggctcgtgcttgtgcggaagcgggcgtgttcctgatctcgccgtttgttggccgtattcttgactggtacaaagcgaataccgataagaaagagtacgctccggcagaagatccgggcgtggtttctgtatctgaaatctaccagtactacaaagagcacggttatgaaaccgtggttatgggcgcaagcttccgtaacatcggcgaaattctggaactggcaggctgcgaccgtctgaccatcgcaccggcactgctgaaagagctggcggagagcgaaggggctatcgaacgtaaactgtcttacaccggcgaagtgaaagcgcgtccggcgcgtatcactgagtccgagttcctgtggcagcacaaccaggatccaatggcagtagataaactggcggaaggtatccgtaagtttgctattgaccaggaaaaactggaaaaaatgatcggcgatctgctgtaatcattcttagcgtgaccgggaagtcggtcacgctacctcttctgaagcctgtctgtcactcccttcgcagtgtatcattctgtttaacgagactgtttaaacggaaaaatcttgatgaatactttacgtattggcttagtttccatctctgatcgcgcatccagcggcgtttatcaggataaaggcatccctgcgctggaagaatggctgacatcggcgctaaccacgccgtttgaactggaaacccgcttaatccccgatgagcaggcgatcatcgagcaaacgttgtgtgagctggtggatgaaatgagttgccatctggtgctcaccacgggcggaactggcccggcgcgtcgtgacgtaacgcccgatgcgacgctggcagtagcggaccgcgagatgcctggctttggtgaacagatgcgccagatcagcctgcattttgtaccaactgcgatcctttcgcgtcaggtgggcgtgattcgcaaacaggcgctgatccttaacttacccggtcagccgaagtctattaaagagacgctggaaggtgtgaaggacgctgagggtaacgttgtggtacacggtatttttgccagcgtaccgtactgcattcagttgctggaagggccatacgttgaaacggcaccggaagtggttgcagcattcagaccgaagagtgcaagacgcgacgttagcgaataaaaaaatccccccgagcggggggatctcaaaacaattagtgggattcaccaatcggcagaacggtgcgaccaaactgctcgttcagtacttcacccatcgccagatagattgcgctggcaccgcagatcagcccaatccagccggcaaagtggatgattgcggcgttaccggcaatgttaccgatcgccagcagggcaaacagcacggtcaggctaaagaaaacgaattgcagaacgcgtgcgcctttcagcgtgccgaagaacataaacagcgtaaatacgccccacagacccaggtagacaccaaggaactgtgcatttggcgcatcggtcagacccagtttcggcatcagcagaatcgcaaccagcgtcagccagaaagaaccgtaagaggtgaatgcggttaaaccgaaagtgttgccttttttgtactccagcagaccagcaaaaatttgcgcgatgccgccgtagaaaatgcccatggcaagaataataccgtccagagcgaaataacccacgttgtgcaggttaagcagaatggtggtcatgccgaagcccatcaggcccagcggtgccggattagccaacttagtgttgcccataattcctcaaaaatcatcatcgaatgaatggtgaaataatttccctgaataactgtagtgttttcagggcgcggcataataatcagccagtggggcagtgtctacgatcttttgaggggaaaatgaaaattttccccggtttccggtatcagacctgagtggcgctaaccatccggcgcaggcaggcgatttgcagtacggctggaatcgtcacgcgataggcgctgccgctgaccgctttaaccccatttagtgccgcacctacagggcctcccagccccgcgccgcgcagcaaaccatgcccaagtacgctcattgctgcgtgggtgcgtaaaatgcgggtcagttggctggaaagcaaatgcgacacaccttttgccaataatttgtctttcatcagcagcggcagcagctcttccagctcattcaccctggcatcgaccgcgtgcagaaactcctgcttatgttcctcgtccattttcttccaggtattacgcagaaattgttccagtaactgttgctcaatttcaaacgtagacatctctttgtcggctttcagcttcaatcgctttgaaacatcgagcaaaatggcccgatacaatttaccgtgtccgcgcagtttgttggcgatactatcgccaccaaaatgctgtaattctccggcaatcagctgccagttgcggcgatgttgctcgggatgcccttccatcgatttaaacagttcgttgcgcatcagtacgctggagaggcgagttttgcctttttcattatgggtgagcaatcgggcgaaatttgccaactgttcctcactacaatgctgaagaaaatccagatctgaatcattcaggtaattaacattcattttttgtggcttctatattctggcgttagtcgtcgccgataattttcagcgtggccatatccgatgagttcaccgtatgacccgaaaaggtgatttttgagacgcagcgtttattgtcgttatcgctgttaatgttgatccagtcagtggtttgcccttcttttatttctgaaggaatattcaggctctgactggcgctacgggcggctttgaaataaaccgatgcaccgcttaactgtaaatcgccatggtcggcagagagttgtatgcgtttcacaatgcgacaaacaggaagtttcagcgccagatcgttggtttcgttacgcggcattgcaatggcgccgaggagtttatggtcgtttgcctgcgccgtgcagcacagcatcaggctaatcgccaggctggcggaaatcgtaaaaacggatttcataaggattctcttagtgggaagaggtagggggatgaatacccactagtttactgctgataaagagaagattcaggcacgtaatcttttctttttattacaattttttgatgaatgccttggctgcgattcattctttatatgaataaaattgctgtcaattttacgtcttgtcctgccatatcgcgaaatttctgcgcaaaagcacaaaaaatttttgcatctcccccttgatgacgtggtttacgaccccatttagtagtcaaccgcagtgagtgagtctgcaaaaaaatgaaattgggcagttgaaaccagacgtttcgcccctattacagactcacaaccacatgatgaccgaatatatagtggagacgtttagatgggtaaaataattggtatcgacctgggtactaccaactcttgtgtagcgattatggatggcaccactcctcgcgtgctggagaacgccgaaggcgatcgcaccacgccttctatcattgcctatacccaggatggtgaaactctagttggtcagccggctaaacgtcaggcagtgacgaacccgcaaaacactctgtttgcgattaaacgcctgattggtcgccgcttccaggacgaagaagtacagcgtgatgtttccatcatgccgttcaaaattattgctgctgataacggcgacgcatgggtcgaagttaaaggccagaaaatggcaccgccgcagatttctgctgaagtgctgaaaaaaatgaagaaaaccgctgaagattacctgggtgaaccggtaactgaagctgttatcaccgtaccggcatactttaacgatgctcagcgtcaggcaaccaaagacgcaggccgtatcgctggtctggaagtaaaacgtatcatcaacgaaccgaccgcagctgcgctggcttacggtctggacaaaggcactggcaaccgtactatcgcggtttatgacctgggtggtggtactttcgatatttctattatcgaaatcgacgaagttgacggcgaaaaaaccttcgaagttctggcaaccaacggtgatacccacctggggggtgaagacttcgacagccgtctgatcaactatctggttgaagaattcaagaaagatcagggcattgacctgcgcaacgatccgctggcaatgcagcgcctgaaagaagcggcagaaaaagcgaaaatcgaactgtcttccgctcagcagaccgacgttaacctgccatacatcactgcagacgcgaccggtccgaaacacatgaacatcaaagtgactcgtgcgaaactggaaagcctggttgaagatctggtaaaccgttccattgagccgctgaaagttgcactgcaggacgctggcctgtccgtatctgatatcgacgacgttatcctcgttggtggtcagactcgtatgccaatggttcagaagaaagttgctgagttctttggtaaagagccgcgtaaagacgttaacccggacgaagctgtagcaatcggtgctgctgttcagggtggtgttctgactggtgacgtaaaagacgtactgctgctggacgttaccccgctgtctctgggtatcgaaaccatgggcggtgtgatgacgacgctgatcgcgaaaaacaccactatcccgaccaagcacagccaggtgttctctaccgctgaagacaaccagtctgcggtaaccatccatgtgctgcagggtgaacgtaaacgtgcggctgataacaaatctctgggtcagttcaacctagatggtatcaacccggcaccgcgcggcatgccgcagatcgaagttaccttcgatatcgatgctgacggtatcctgcacgtttccgcgaaagataaaaacagcggtaaagagcagaagatcaccatcaaggcttcttctggtctgaacgaagatgaaatccagaaaatggtacgcgacgcagaagctaacgccgaagctgaccgtaagtttgaagagctggtacagactcgcaaccagggcgaccatctgctgcacagcacccgtaagcaggttgaagaagcaggcgacaaactgccggctgacgacaaaactgctatcgagtctgcgctgactgcactggaaactgctctgaaaggtgaagacaaagccgctatcgaagcgaaaatgcaggaactggcacaggtttcccagaaactgatggaaatcgcccagcagcaacatgcccagcagcagactgccggtgctgatgcttctgcaaacaacgcgaaagatgacgatgttgtcgacgctgaatttgaagaagtcaaagacaaaaaataatcgccctataaacgggtaattatactgacacgggcgaaggggaatttcctctccgcccgtgcattcatctaggggcaatttaaaaaagatggctaagcaagattattacgagattttaggcgtttccaaaacagcggaagagcgtgaaatcagaaaggcctacaaacgcctggccatgaaataccacccggaccgtaaccagggtgacaaagaggccgaggcgaaatttaaagagatcaaggaagcttatgaagttctgaccgactcgcaaaaacgtgcggcatacgatcagtatggtcatgctgcgtttgagcaaggtggcatgggcggcggcggttttggcggcggcgcagacttcagcgatatttttggtgacgttttcggcgatatttttggcggcggacgtggtcgtcaacgtgcggcgcgcggtgctgatttacgctataacatggagctcaccctcgaagaagctgtacgtggcgtgaccaaagagatccgcattccgactctggaagagtgtgacgtttgccacggtagcggtgcaaaaccaggtacacagccgcagacttgtccgacctgtcatggttctggtcaggtgcagatgcgccagggattcttcgctgtacagcagacctgtccacactgtcagggccgcggtacgctgatcaaagatccgtgcaacaaatgtcatggtcatggtcgtgttgagcgcagcaaaacgctgtccgttaaaatcccggcaggggtggacactggagaccgcatccgtcttgcgggcgaaggtgaagcgggcgagcatggcgcaccggcaggcgatctgtacgttcaggttcaggttaaacagcacccgattttcgagcgtgaaggcaacaacctgtattgcgaagtcccgatcaacttcgctatggcggcgctgggtggcgaaatcgaagtaccgacccttgatggtcgcgtcaaactgaaagtgcctggcgaaacccagaccggtaagctattccgtatgcgcggtaaaggcgtcaagtctgtccgcggtggcgcacagggtgatttgctgtgccgcgttgtcgtcgaaacaccggtaggcctgaacgaaaggcagaaacagctgctgcaagagctgcaagaaagcttcggtggcccaaccggcgagcacaacagcccgcgctcaaagagcttctttgatggtgtgaagaagttttttgacgacctgacccgctaacctccccaaaagcctgcccgtgggcaggcctgggtaaaaatagggtgcgttgaagatatgcgagcacctgtaaagtggcggggatcactcccataagcgctaacttaagggttgtggtattacgcctgatatgatttaacgtgccgatgaattactctcacgataactggtcagcaattctggcccatattggtaagcccgaagaactggatacttcggcacgtaatgccggggctctaacccgccgccgcgaaattcgtgatgctgcaactctgctacgtctggggctggcttacggccccggggggatgtcattacgtgaagtcactgcatgggctcagctccatgacgttgcaacattatctgacgtggctctcctgaagcggctgcggaatgccgccgactggtttggcatacttgccgcacaaacacttgctgtacgcgccgcagttacgggttgtacaagcggaaagagattgcgtcttgtcgatggaacagcaatcagtgcgcccgggggcggcagcgctgaatggcgactacatatgggatatgatcctcatacctgtcagttcactgattttgagctaaccgacagcagagacgctgaacggctggaccgatttgcgcaaacggcagacgagatacgcattgctgaccggggattcggttcgcgtcccgaatgtatccgctcacttgcttttggagaagctgattatatcgtccgggttcactggcgaggattgcgctggttaactgcagaaggaatgcgctttgacatgatgggttttctgcgcgggctggattgcggtaagaacggtgaaaccactgtaatgataggcaattcaggtaataaaaaagccggagctccctttccggcacgtctcattgccgtatcacttcctcccgaaaaagcattaatcagtaaaacccgactgctcagcgagaatcgtcgaaaaggacgagtagttcaggcggaaacgctggaagcagcgggccatgtgctattgctaacatcattaccggaagatgaatattcagcagagcaagtggctgattgttaccgtctgcgatggcaaattgaactggcttttaagcggctcaaaagtttgctgcacctggatgctttgcgtgcaaaggaacctgaactcgcgaaagcgtggatatttgctaatctactcgccgcatttttaattgacgacataatccagccatcgctggatttcccccccagaagtgccggatccgaaaagaagaactaactcgttgtggagaataacaaaaatggtcatctggagcttacaggtggccattcgtgggacagtatccctgacagcctacaaaacgcaattgaagaacgcgaggcatcgtcttaacgaggcaccgaggcgtcgcattcttcagatggttcaacccttaagttagcgcttatgggatcactccccgccgttgctcttactcggattcgtaagccgtgaaaacagcaacctccgtctggccagttcggatgtgaacctcacagaggtcttttctcgttaccagcgccgccactacggcggtgatacagatgacgatcagggcgacaatcatcgccttatgctgcttcattgctctcttctccttgaccttacggtcagtaagaggcactctacatgtgttcagcatataggaggcctcgggttgatggtaaaatatcactcggggcttttctctatctgccgttcagctaatgcctgagacagacagcctcaagcacccgccgctattatatcgctctctttaacccattttgttttatcgattctaatcctgaagacgcctcgcatttttgtggcgtaattttttaatgatttaattatttaactttaatttatctcttcatcgcaattattgacgacaagctggattatttttgaaatattggcctaacaagcatcgccgactgacaacaaattaattattacttttcctaattaatccctcaggaatcctcaccttaagctatgattatctaggcttagggtcactcgtgagcgcttacagccgtcaaaaacgcatctcaccgctgatggcgcaaattcttcaatagctcgtaaaaaacgaattattcctacactataatctgattttaacgatgattcgtgcggggtaaaatagtaaaaacgatctattcacctgaaagagaaataaaaagtgaaacatctgcatcgattctttagcagtgatgcctcgggaggcattattcttatcattgccgctatcctggcgatgattatggccaacagcggcgcaaccagtggatggtatcacgactttctggagacgccggttcagctccgggttggttcactcgaaatcaacaaaaacatgctgttatggataaatgacgcgctgatggcggtatttttcctgttagtcggtctggaagttaaacgtgaactgatgcaaggatcgctagccagcttacgccaggccgcatttccagttatcgccgctattggtgggatgattgtgccggcattactctatctggcttttaactatgccgatccgattacccgcgaagggtgggcgatcccggcggctactgacattgcttttgcacttggtgtactggcgctgttgggaagtcgtgttccgttagcgctgaagatctttttgatggctctggctattatcgacgatcttggggccatcattatcatcgcattgttctacactaatgacttatcgatggcctctcttggcgtcgcggctgtagcaattgcggtactcgcggtattgaatctgtgtggtgcacgccgcacgggcgtctatattcttgttggcgtggtgttgtggactgcggtgttgaaatcgggggttcacgcaactctggcgggggtaattgtcggcttctttattcctttgaaagagaagcatgggcgttctccagcgaagcgactggagcatgtgttgcacccgtgggtggcgtatctgattttgccgctgtttgcatttgctaatgctggcgtttcactgcaaggcgtcacgctggatggcttgacctccattctgccattggggatcatcgctggcttgctgattggcaaaccgctggggattagtctgttctgctggttggcgctgcgtttgaaactggcgcatctgcctgagggaacgacttatcagcaaattatggtggtggggatcctgtgcggtatcggttttactatgtctatctttattgccagcctggcctttggtagcgtagatccagaactgattaactgggcgaaactcggtatcctggtcggttctatctcttcggcggtaattggatacagctggttacgcgttcgtttgcgtccatcagtttgacaggacggtttaccggggagccataaacggctcccttttcattgttatcagggagagaaatgagcatgtctcatatcaattacaaccacttgtattacttctggcatgtctataaagaaggttccgtggttggcgcagcggaggcgctttatttaactccacaaaccattaccggacagattcgagcgctggaagagcgcctgcaaggcaaattatttaaacgcaagggacgtggtctcgaacccagcgagctgggagaactggtctatcgctatgccgataaaatgttcaccttaagccaggaaatgctggatattgtgaactatcgcaaagaatccaatttattgtttgacgttggcgtggctgatgcactttccaaacgcctggtcagtagcgtacttaacgccgcagtggtagaaggcgagcccattcatcttcgctgcttcgaatccacccacgaaatgctgctggagcaattaagtcagcataaactggatatgatcatttctgactgtccgatagactctacgcagcaggaaggcctgttctccgtgagaattggcgaatgtggcgtgagtttctggtgtacaaatccaccaccagaaaaaccgttcccggcttgtctggaagaacggcgacttttgattcctgggcgacgttcaatgttagggcgcaaattgcttaactggtttaactcccagggattaaacgtagaaatcctcggcgagtttgatgatgccgctttgatgaaagcttttggtgcgatgcacaatgcaatcttcgttgccccaacgctttatgcatatgacttttatgccgataaaactgtcgtagaaattggtcgcgtcgagaatgtgatggaagagtaccatgctatttttgctgagcggatgattcagcacccggcggtacagcgaatctgcaatacggattattctgcgctttttagtccagcggtgcgttaatcggcagctcccccaaagttaaggtgggggagatagattagttgtacattaccacgattttgactcggctcattatttgcccgcttgagacattgtttccatatgtacgcgggcgaataaatagaggaatctgattacttccttcatggggatgctgaaaagagtagtaattgctggtaatgactccaacttattgatagtgttttatgttcagataatgcccgatgactttgtcatgcagctccaccgattttgagaacgacagcgacttccgtcccagccgtgccaggtgctgcctcagattcaggttatgccgctcaattcgctgcgtatatcgcttgctgattacgtgcagctttcccttcaggcgggattcatacagcggccagccatccgtcatccatatcaccacgtcaaagggtgacagcaggctcataagacgccccagcgtcgccatagtgcgttcaccgaatacgtgcgcaacaaccgtcttccggagactgtcatacgcgtaaaacagccagcgctggcgcgatttagccccgacatagccccactgttcgtccatttccgcgcagacgatgacgtcactgcccggctgtatgcgcgaggttaccgactgcggcctgagttttttaagtgacgtaaaatcgtgttgaggccaacgcccataatgcgggctgttgcccggcatccaacgccattcatggccatatcaatgattttctggtgcgtaccgggttgagaagcggtgtaagtgaactgcagttgccatgttttacggcagtgagagcagagatagcgctgatgtccggcggtgcttttgccgttacgcaccaccccgtcagtagctgaacaggagggacagctgatagaaacagaagccactggagcacctcaaaaacaccatcatacactaaatcagtaagttggcagcatcacctacctcaatgtgtatcacaatatccatattctttgtgggggagtctggagattgagtagatattcttgttcagaatgtatcagccgatggttctacgattcttaagccacgaagagttcagatagtacaacggcatgtctcttttgactatctggcaaccggcagtgtgttctctcacgcatcacaaaagcagcaggcataaaaaaacccgcttgcgcgggctttttcacaaagcttcagcaaattggcgattaagccagtttgttgatctgtgcagtcaggttagccttatgacgtgcagctttgtttttgtggatcagacctttagcagcctgacggtccacgatcggttgcatttcgttaaatgctttctgtgcagcagctttgtcgccagcttcgatagctgcgtatactttcttgatgaaagtacgcatcatagagcgacggcttgcgttgtgcttacgagccttttcagactgaatggcgcgcttcttagctgatttgatattagccaaggtccaactcccaaatgtgttctatatggacaattcaaaggccgaggaatatgcccttttagccttcttttgtcaatggatttgtgcaaataagcgccgttaatgtgccggcactcgttacgtagtgatggcgcaggattctaccagcttgcggggtgtgaatacagcttttccgcgataaaaattgcagcaggcggtcagtttcttcccgtgatttgcgccatggcaatgaaaagccacttctttctgatttcggtactcaatcgccggttaaccttgaccgctgtacaaggtatactcggacgattttcactgttttgagccagacatgaagctgatacgcggcatacataatctcagccaggccccgcaagaagggtgtgtgctgactattggtaatttcgacggcgtgcatcgcggtcatcgcgcgctgttacagggcttgcaggaagaagggcgcaagcgcaacttaccggtgatggtgatgctttttgaacctcaaccactggaactgtttgctaccgataaagccccggcaagactgacccggctgcgggaaaaactgcgttaccttgcagagtgtggcgttgattacgtgctgtgcgtgcgtttcgacaggcgtttcgcggcgttaaccgcgcaaaatttcatcagcgatcttctggtgaagcatttgcgcgtaaaatttcttgccgtaggtgatgatttccgctttggcgctggtcgtgaaggcgatttcttgttattacagaaagctggcatggaatacggcttcgatatcaccagtacgcaaactttttgcgaaggtggcgtgcgcatcagcagcaccgccgtgcgtcaggcccttgcggatgacaatctggctctggcagagagtttactggggcacccgtttgccatctccgggcgtgtagtccacggtgatgaattagggcgcactataggtttcccgacggcgaatgtaccgctgcgccgtcaggtttccccggtgaaaggggtttatgcggtagaagtgctgggcctcggtgaaaagccgttacccggcgtggcaaacatcggaacacgcccaacggttgccggtattcgccagcagctggaagtgcatttgttagatgttgcaatggacctttacggtcgccatatacaagtagtgctgcgtaaaaaaatacgcaatgagcagcgatttgcgtcgctggacgaactgaaagcgcagattgcgcgtgatgaattaaccgcccgcgaattttttgggctaacaaaaccggcttaagcctgttatgtaatcaaaccgaaatacggaaccgagaatctgatgagtgactataaatcaaccctgaatttgccggaaacagggttcccgatgcgtggcgatctcgccaagcgcgaacccggaatgctggcgcgttggactgatgatgatctgtacggcatcatccgtgcggctaaaaaaggcaaaaaaaccttcattctgcatgatggccctccttatgcgaatggcagcattcatattggtcactcggttaacaagattctgaaagacattatcgtgaagtccaaagggctttccggttatgactcgccgtatgtgcctggctgggactgccacggtctgccgatcgagctgaaagtcgagcaagaatacggtaagccgggtgagaaattcaccgccgccgagttccgcgccaagtgccgcgaatacgcggcgacccaggttgacggtcaacgcaaagactttatccgtctgggcgtgctgggcgactggtcgcacccgtacctgaccatggacttcaaaactgaagccaacatcatccgcgcgctgggcaaaatcatcggcaacggtcacctgcacaaaggcgcgaagccagttcactggtgcgttgactgccgttctgcgctggcggaagcggaagttgagtattacgacaaaacttctccgtccatcgacgttgctttccaggcagtcgatcaggatgcactgaaagcaaaatttgccgtaagcaacgttaacggcccaatctcgctggtaatctggaccaccacgccgtggactctgcctgccaaccgcgcaatctctattgcaccagatttcgactatgcgctggtgcagatcgacggtcaggccgtgattctggcgaaagatctggttgaaagcgtaatgcagcgtatcggcgtgaccgattacaccattctcggcacggtaaaaggtgcggagcttgagctgctgcgctttacccatccgtttatgggcttcgacgttccggcaatcctcggcgatcacgttaccctggatgccggtaccggtgccgttcacaccgcgcctggccacggcccggacgactatgtgatcggtcagaaatacggcctggaaaccgctaacccggttggcccggacggcacttatctgccgggcacttatccgacgctggatggcgtgaacgtcttcaaagcgaacgacatcgtcgttgcgctgctgcaggaaaaaggcgcgctgctgcacgttgagaaaatgcagcacagctatccgtgctgctggcgtcacaaaacgccgatcatcttccgcgcgacgccgcagtggttcgtcagcatggatcagaaaggtctgcgtgcgcagtcactgaaagagatcaaaggcgtgcagtggatcccggactggggccaggcgcgtatcgagtcgatggttgctaaccgtcctgactggtgtatctcccgtcagcgcacctggggtgtaccgatgtcactgttcgtgcacaaagacacggaagagctgcatccgcgtacccttgaactgatggaagaagtggcaaaacgcgttgaagtcgatggcatccaggcgtggtgggatctcgatgcgaaagagatcctcggcgacgaagctgatcagtacgtgaaagtgccggacacattggatgtatggtttgactccggatctacccactcttctgttgttgacgtgcgtccggaatttgccggtcacgcagcggacatgtatctggaaggttctgaccaacaccgcggctggttcatgtcttccctaatgatctccaccgcgatgaagggtaaagcgccgtatcgtcaggtactgacccacggctttaccgtggatggtcagggccgcaagatgtctaaatccatcggcaataccgtttcgccgcaggatgtgatgaacaaactgggcgcggatattctgcgtctgtgggtggcatcaaccgactacaccggtgaaatggccgtttctgacgagatcctgaaacgtgctgccgatagctatcgtcgtatccgtaacaccgcgcgcttcctgctggcaaacctgaacggttttgatccagcaaaagatatggtgaaaccggaagagatggtggtactggatcgctgggccgtaggttgtgcgaaagcggcacaggaagacatcctcaaggcgtacgaagcatacgatttccacgaagtggtacagcgtctgatgcgcttctgctccgttgagatgggttccttctacctcgacatcatcaaagaccgtcagtacaccgccaaagcggacagtgtggcgcgtcgtagctgccagactgcgctatatcacatcgcagaagcgctggtgcgctggatggcaccaatcctctccttcaccgctgatgaagtgtggggctacctgccgggcgaacgtgaaaaatacgtcttcaccggtgagtggtacgaaggcctgtttggcctggcagacagtgaagcgatgaacgatgcgttctgggacgagctgttgaaagtgcgtggcgaagtgaacaaagtcattgagcaagcgcgtgccgacaagaaagtgggtggctcgctggaagcggcagtaaccttgtatgcagaaccggaactgtcggcgaaactgaccgcgctgggcgatgaattacgatttgtcctgttgacctccggcgctaccgttgcagactataacgacgcacctgctgatgctcagcagagcgaagtactcaaagggctgaaagtcgcgttgagtaaagccgaaggtgagaagtgcccacgctgctggcactacacccaggatgtcggcaaggtggcggaacacgcagaaatctgcggccgctgtgtcagcaacgtcgccggtgacggtgaaaaacgtaagtttgcctgatgagtcaatcgatctgttcaacagggctacgctggctgtggctggtggtagtcgtgctgattatcgatctgggcagcaaatacctgatcctccagaactttgctctgggggatacggtcccgctgttcccgtcgcttaatctgcattatgcgcgtaactatggcgcggcgtttagtttccttgccgatagcggcggctggcagcgttggttctttgccggtattgcgattggtattagcgtgatcctggcagtgatgatgtatcgctcgaaggccacgcagaagctaaacaatatcgcttacgcgctgattattggcggcgcgctgggcaacctgttcgaccgcctgtggcacggcttcgttgtcgatatgatcgacttctacgtcggcgactggcacttcgccaccttcaaccttgccgatactgccatctgtgtcggtgcggcactgattgtgctggaaggttttttgccttctagagcgaaaaaacaataataaaccctgccggatgcgatgctgacgcatcttatccggcctacagattgctgcgaaatcgtaggccggataaggcgtttacgccgcatccggcaaaaatccttaaatataagagcaaacctgcatgtctgaatctgtacagagcaatagcgccgtcctggtgcacttcacgctaaaactcgacgatggcaccaccgccgagtctacccgcaacaacggtaaaccggcgctgttccgcctgggtgatgcttctctttctgaagggctggagcaacacctgttggggctgaaagtgggcgataaaaccaccttctcgttggagccagatgcggcgtttggcgtgccgtcaccggacctgattcagtacttctcccgccgtgaatttatggatgcaggcgagccagaaattggcgcaatcatgctttttaccgcaatggatggcagtgagatgcctggcgtgatccgcgaaattaacggcgactccattaccgttgatttcaaccatccgctggccgggcagaccgttcattttgatattgaagtgctggaaatcgatccggcactggaggcgtaacatgcagatcctgttggccaacccgcgtggtttttgtgccggggtagaccgcgctatcagcattgttgaaaacgcgctggccatttacggcgcaccgatatatgtccgtcacgaagtggtacataaccgctatgtggtcgatagcttgcgtgagcgtggggctatctttattgagcagattagcgaagtaccggacggcgcgatcctgattttctccgcacacggtgtttctcaggcggtacgtaacgaagcaaaaagtcgcgatttgacggtgtttgatgccacctgtccgctggtgaccaaagtgcatatggaagtcgcccgcgccagtcgccgtggcgaagaatctattctcatcggtcacgccgggcacccggaagtggaagggacaatgggccagtacagtaacccggaagggggaatgtatctggtcgaatcgccggacgatgtgtggaaactgacggtcaaaaacgaagagaagctctcctttatgacccagaccacgctgtcggtggatgacacgtctgatgtgatcgacgcgctgcgtaaacgcttcccgaaaattgtcggtccgcgcaaagatgacatctgctacgccacgactaaccgtcaggaagcggtacgcgccctggcagaacaggcggaagttgtgttggtggtcggttcgaaaaactcctccaactccaaccgtctggcggagctggcccagcgtatgggcaaacgcgcgtttttgattgacgatgcgaaagacatccaggaagagtgggtgaaagaggttaaatgcgtcggcgtgactgcgggcgcatcggctccggatattctggtgcagaatgtggtggcacgtttgcagcagctgggcggtggtgaagccattccgctggaaggccgtgaagaaaacattgttttcgaagtgccgaaagagctgcgtgtcgatattcgtgaagtcgattaagtcattagcagcctaagttatgcgaaaatgccggtcttgttaccggcattttttatggagaaaacatgcgtttacctatcttcctcgatactgaccccggcattgacgatgccgtcgccattgccgccgcgatttttgcacccgaactcgacctgcaactgatgaccaccgtcgcgggtaatgtctcggttgagaaaactacccgcaatgccctgcaactgctgcatttctggaatgcggagattccgctcgcccaaggggccgctgtgccactggtacgcgcaccgcgtgatgcggcatctgtgcacggcgaatcgggaatggctggctacgactttgttgagcacaaccgaaagccgctcgggataccggcgtttctggcgattcgggatgccctgatgcgtgcaccagagcctgttaccctggtggccatcggcccgttaaccaatattgcgctgttactttcacaatgcccggaatgcaagccgtatattcgccgtctggtgatcatgggtggttctgccggacgcggcaactgtacgccaaacgccgagtttaatattgctgccgatccagaagctgctgcctgtgtcttccgcagtggtattgaaatcgtcatgtgcggtttggatgtcaccaatcaggcaatattaactcctgactatctctctacactgccgcagttaaaccgtaccgggaaaatgcttcacgccctgtttagccactaccgtagcggcagtatgcaaagcggcttgcgaatgcacgatctctgcgccatcgcctggctggtgcgcccggacctgttcactctcaaaccctgttttgtggcagtggaaactcagggcgaatttacctcaggcacgacggtggttgatatcgacggttgcctgggcaagccagccaatgtacaggtggcattggatctggatgtgaaaggcttccagcagtgggtggctgaggtgctggctctggcgtcgtaacctgtcacatgttattggcatgcagtcattcatcgactcatgcctttcactgatatccctccctgtttatcattaatttctaattatcagcgtttttggctggcggcgtagcgatgcgctggttactctgaaaacggtctatgcaaattaacaaaagagaatagctatgcatgatgcaaacatccgcgttgccatcgcgggagccggggggcgtatgggccgccagttgattcaggcggcgctggcattagagggcgtgcagttgggcgctgcgctggagcgtgaaggatcttctttactgggcagcgacgccggtgagctggccggagccgggaaaacaggcgttaccgtgcaaagcagcctcgatgcggtaaaagatgattttgatgtgtttatcgattttacccgtccggaaggtacgctgaaccatctcgctttttgtcgccagcatggcaaagggatggtgatcggcactacggggtttgacgaagccggtaaacaagcaattcgtgacgccgctgccgatattgcgattgtctttgctgccaattttagcgttggcgttaacgtcatgcttaagctgctggagaaagcagccaaagtgatgggtgactacaccgatatcgaaattattgaagcacatcatagacataaagttgatgcgccgtcaggcaccgcactggcaatgggagaggcgatcgcccacgcccttgataaagatctgaaagattgcgcggtctacagtcgtgaaggccacaccggtgaacgtgtgcctggcaccattggttttgccaccgtgcgtgcaggtgacatcgttggtgaacataccgcgatgtttgccgatattggcgagcgtctggagatcacccataaggcgtccagccgtatgacatttgctaacggcgcggtaagatcggctttgtggttgagtggtaaggaaagcggtctttttgatatgcgagatgtacttgatctcaataatttgtaaccacaaaatatttgttatggtgcaaaaataacacatttaatttattgattataaagggctttaatttttggcccttttatttttggtgttatgtttttaaattgtctataagtgccaaaaattacatgttttgtcttctgtttttgttgttttaatgtaaattttgaccatttggtccacttttttctgctcgtttttatttcatgcaatcttcttgctgcgcaagcgttttccagaacaggttagatgatctttttgtcgcttaatgcctgtaaaacatgcatgagccacaaaataatataaaaaatcccgccattaagttgacttttagcgcccatatctccagaatgccgccgtttgccagaaattcgtcggtaagcagatttgcattgatttacgtcatcattgtgaattaatatgcaaataaagtgagtgaatattctctggagggtgttttgattaagtcagcgctattggttctggaagacggaacccagtttcacggtcgggccataggggcaacaggttcggcggttggggaagtcgttttcaatacttcaatgaccggttatcaagaaatcctcactgatccttcctattctcgtcaaatcgttactcttacttatccccatattggcaatgtcggcaccaatgacgccgatgaagaatcttctcaggtacatgcacaaggtctggtgattcgcgacctgccgctgattgccagcaacttccgtaataccgaagacctctcttcttacctgaaacgccataacatcgtggcgattgccgatatcgatacccgtaagctgacgcgtttactgcgcgagaaaggcgcacagaatggctgcattatcgcgggcgataacccggatgcggcgctggcgttagaaaaagcccgcgcgttcccaggtctgaatggcatggatctggcaaaagaagtgaccaccgcagaagcctatagctggacacaagggagctggacgttgaccggtggcctgccagaagcgaaaaaagaagacgagctgccgttccacgtcgtggcttatgattttggtgccaagcgcaacatcctgcggatgctggtggatagaggctgtcgcctgaccatcgttccggcgcaaacttctgcggaagatgtgctgaaaatgaatccagacggcatcttcctctccaacggtcctggcgacccggccccgtgcgattacgccattaccgccatccagaaattcctcgaaaccgatattccggtattcggcatctgtctcggtcatcagctgctggcgctggcgagcggtgcgaagactgtcaaaatgaaatttggtcaccacggcggcaaccatccggttaaagatgtggagaaaaacgtggtaatgatcaccgcccagaaccacggttttgcggtggacgaagcaacattacctgcaaacctgcgtgtcacgcataaatccctgttcgacggtacgttacagggcattcatcgcaccgataaaccggcattcagcttccaggggcaccctgaagccagccctggtccacacgacgccgcgccgttgttcgaccactttatcgagttaattgagcagtaccgtaaaaccgctaagtaatcaggagtaaaagagccatgccaaaacgtacagatataaaaagtatcctgattctgggtgcgggcccgattgttatcggtcaggcgtgtgagtttgactactctggcgcgcaagcgtgtaaagccctgcgtgaagagggttaccgcgtcattctggtgaactccaacccggcgaccatcatgaccgacccggaaatggctgatgcaacctacatcgagccgattcactgggaagttgtacgcaagattattgaaaaagagcgcccggacgcggtgctgccaacgatgggcggtcagacggcgctgaactgcgcgctggagctggaacgtcagggcgtgttggaagagttcggtgtcaccatgattggtgccactgccgatgcgattgataaagcagaagaccgccgtcgtttcgacgtagcgatgaagaaaattggtctggaaaccgcgcgttccggtatcgcacacacgatggaagaagcgctggcggttgccgctgacgtgggcttcccgtgcattattcgcccatcctttaccatgggcggtagcggcggcggtatcgcttataaccgtgaagagtttgaagaaatttgcgcccgcggtctggatctctctccgaccaaagagttgctgattgatgagtcgctgatcggctggaaagagtacgagatggaagtggtgcgtgataaaaacgacaactgcatcatcgtctgctctatcgaaaacttcgatgcgatgggcatccacaccggtgactccatcactgtcgcgccagcccaaacgctgaccgacaaagaatatcaaatcatgcgtaacgcctcgatggcggtgctgcgtgaaatcggcgttgaaaccggtggttccaacgttcagtttgcggtgaacccgaaaaacggtcgtctgattgttatcgaaatgaacccacgcgtgtcccgttcttcggcgctggcgtcgaaagcgaccggtttcccgattgctaaagtggcggcgaaactggcggtgggttacaccctcgacgaactgatgaacgacatcactggcggacgtactccggcctccttcgagccgtccatcgactatgtggttactaaaattcctcgcttcaacttcgaaaaattcgccggtgctaacgaccgtctgaccactcagatgaaatcggttggcgaagtgatggcgattggtcgcacgcagcaggaatccctgcaaaaagcgctgcgcggcctggaagtcggtgcgactggattcgacccgaaagtgagcctggatgacccggaagcgttaaccaaaatccgtcgcgaactgaaagacgcaggcgcagatcgtatctggtacatcgccgatgcgttccgtgcgggcctgtctgtggacggcgtcttcaacctgaccaacattgaccgctggttcctggtacagattgaagagctggtgcgtctggaagagaaagtggcggaagtgggcatcactggcctgaacgctgacttcctgcgccagctgaaacgcaaaggctttgccgatgcgcgcttggcaaaactggcgggcgtacgcgaagcggaaatccgtaagctgcgtgaccagtatgacctgcacccggtttataagcgcgtggatacctgtgcggcagagttcgccaccgacaccgcttacatgtactccacttatgaagaagagtgcgaagcgaatccgtctaccgaccgtgaaaaaatcatggtgcttggcggcggcccgaaccgtatcggtcagggtatcgaattcgactactgttgcgtacacgcctcgctggcgctgcgcgaagacggttacgaaaccattatggttaactgtaacccggaaaccgtctccaccgactacgacacttccgaccgcctctacttcgagccggtaactctggaagatgtgctggaaatcgtgcgtatcgagaagccgaaaggcgttatcgtccagtacggcggtcagaccccgctgaaactggcgcgcgcgctggaagctgctggcgtaccggttatcggcaccagcccggatgctatcgaccgtgcagaagaccgtgaacgcttccagcatgcggttgagcgtctgaaactgaaacaaccggcgaacgccaccgttaccgctattgaaatggcggtagagaaggcgaaagagattggctacccgctggtggtacgtccgtcttacgttctcggcggtcgggcgatggaaatcgtctatgacgaagctgacctgcgtcgctacttccagacggcggtcagcgtgtctaacgatgcgccagtgttgctggaccacttcctcgatgacgcggtagaagttgacgtggatgccatctgcgacggcgaaatggtgctgattggcggcatcatggagcatattgagcaggcgggcgtgcactccggtgactccgcatgttctctgccagcctacaccttaagtcaggaaattcaggatgtgatgcgccagcaggtgcagaaactggccttcgaattgcaggtgcgcggcctgatgaacgtgcagtttgcggtgaaaaacaacgaagtctacctgattgaagttaacccgcgtgcggcgcgtaccgttccgttcgtctccaaagccaccggcgtaccgctggcaaaagtggcggcgcgcgtgatggctggcaaatcgctggctgagcagggcgtaaccaaagaagttatcccgccgtactactcggtgaaagaagtggtgctgccgttcaataaattcccgggcgttgacccgctgttagggccagaaatgcgctctaccggggaagtcatgggcgtgggccgcaccttcgctgaagcgtttgccaaagcgcagctgggcagcaactccaccatgaagaaacacggtcgtgcgctgctttccgtgcgcgaaggcgataaagaacgcgtggtggacctggcggcaaaactgctgaaacagggcttcgagctggatgcgacccacggcacggcgattgtgctgggcgaagcaggtatcaacccgcgtctggtaaacaaggtgcatgaaggccgtccgcacattcaggaccgtatcaagaatggcgaatatacctacatcatcaacaccacctcaggccgtcgtgcgattgaagactcccgcgtgattcgtcgcagtgcgctgcaatataaagtgcattacgacaccaccctgaacggcggctttgccaccgcgatggcgctgaatgccgatgcgactgaaaaagtaatttcggtgcaggaaatgcacgcacagatcaaataatagcgtgtcatggcagatatttttcatccgctaatttgatcgaataactaatacggttctctgatgaggaccgtttttttttgcccattaagtaaatcttttggggaatcgatatttttgatgacataagcaggatttagctcacacttatcgacggtgaagttgcatactatcgatatatccacaattttaatatggccttgtttaattgcttcaaaacgagtcatagccagacttttaatttgtgaaactggagttcgtatgtgtgaaggatatgttgaaaaaccactctacttgttaatcgccgaatggatgatggctgaaaatcggtgggtgatagcaagagagatctctattcatttcgatattgaacacagcaaggcggttaataccctgacttatattctgtcggaagtcacagaaataagctgcgaagttaagatgatccctaataagctggaagggcggggatgccagtgtcagcgactggttaaagtggtcgatatcgatgagcaaatttacgcgcgcctgcgcaataacagtcgggaaaaattagtcggtgtaagaaagacgccgcgtattcctgccgttccgctcacggaacttaaccgcgagcagaagtggcagatgatgttgtcaaagagtatgcgtcgttaattttatctcgttgataccgggcgtcctgcttgccagatgcgatgttgtagcatcttatccagcaaccaggtcgcatccggcaagatcaccgtttaggcgtcacatccgtcgtcccctgcaaacgggggcgattttcctccatttgcctcagtggctgcgtttcatgtaacgatacatgacagcgcccgacaagatcctgatactctttggtattcaaccgtttccagtgtaactcgtcgtcactaacattgcgtacagcgcgggctggcgtacccatcaacaactggcgtttctcgccgcgaaagcccgctttgacaaagctcatggcggcaacaatgctctcttcgccaatgaccgcgccatccataatcacgctgttcatcccgaccaatgcatcgcgaccaatcaaacaaccatgcaggatcgctccgtgcccgatatggccgttttccccaacgatagtgtcagtgtcgcagtagccatgcataatgcagccatcctgaatattggctcccgcttgcacgatcaaccgcccgtagtcaccacgcagtgaggcgagtgggccgatgtagacaccggctcccacaatcacatcgccaatcaagacggcactgggatggacaaacgccgtcgggtgaaccaccggaattaacccctcaaaggcgtaatagctcacggttgttaacgtcctttccacaccggatcgcgcttctcggcaaacgccagcggcccttcaatggcatcttccgaatgcagaaccgatggatagtgtttcaacacgccgctgcgaatatagcgatacgcttcttctaccggcatttcgctggtggtgcggtagatctctttcagcgccgcaatcgccagcggggcgctgttaaccagctgctgagccagttcgcgggcgttatccatcagttccgcctggctaaccacgcggttgactatcccccaacgcagcgcctcttctgcgcccattcgtctgccggtcatcaccatttcattgacgatggcaggcggcaggatcttcggcagacgcagcacaccgccgctgtcaggaacgatgcccagtttggcttccggcagggcgaagctggcgttatcggcacaaacaataaaatctgccgccagcgccagttcaaagccgccgccaaaggcatagccgttcacagctgcgataaccggtttgtcgagattgaaaatttcggttaatcccgcaaaaccacccggaccaaagtcagcatccggtgcttcgccttctgctgccgcttttaaatcccagcccgcggaaaagaacttctctccggcaccggtaataatggcgacacgtaattgcggatcgtcacggaaatttagaaatacttcgcccatttcaaagctggtttttgcatcaatagcattcgcttttggacgatcaagggtaatttccagaattgatccattgcgggtcagatgtaatgattcactcattccttttctccatttttgctttttcagggacgacaacatccctgcaaaaaatgcatattgttttagagtgtgattattagctggcagggtagttccctgctgtttcatttatttcagattctttctaattattttccccgagcaattacgtggcagatcttttctgatctccagataagagggcactttaaatttcgccatattttgttcgcagaagcggaaaaattcctcttcgctcaatgtttcaccttcattcagcaccacaaatgctttgatggcttcatcgcgaatcgaatctttaatacccacaaccacgatgtcctgaattttcgggtgcgcggcgataatattttccagctccacgcaggagacattctcgccgccacgtttaatcatattgcagcggcgatcgacgaaataaaaaaagtcctcttcgtcgcggtatccggtatcgccggtatgcagccagccatcggcttccagcactttcgcagtggcttgtgggttgagaaagtactctttgaagatggttttcccaggtatgcctttaatgcagatttcaccgatctcaccagccgggagcgggcgattgtgatcgtcgcggatctccgcttcgtagcaaaaccccacccgaccaatcgacggccagcgtcgtttatcgccaggacgatcgccgataatgcccacaatggtttccgtcatcccataagacgtcagcaagcgaacgccgaagcgttcacaaaacgcatctttttcctgctccgacaagttgagataaaacatcacttcccgcaggcggtgttgctgatcgttcgctgaaggcggctgtaccatcaacgtacggatcatcatcggaatacattcggtaacggtggcgcggtacttctgtacctgtccccagaaggcgcgggcgctgtatttctcgaccagcacaaaggtggccccggcagaaaacgccgccatcgccgcagtacactggcaatcgatatgaaacgcaggcattaccgtcaggtagacgtcatcgtcacgcagtgcacactgccaggcggagtaatatccagcgaagcgcaggttgtaatgggtaatcaccacacctttcggtcgggaggtggtgccggaggtgaagagaatttccgccgtatcgtcagtcgatagcggcggtgcatagcacaaggtggcaggttgttgatttttcagttgagtaaacgaactcacgccatcatcagcgggaagtgccacatctgtcaggcaaatgtgccgcaattgagtggcatcttcctgctgaatctgttgatacataggatagaattgcgcactggtcaccagcaggcacgcctggctattttgcaggatccacgcgctttcctcgcacaacaggcgggcgttaatcggcaccataatcgcgccaatttttgccagcccgaaccagcaaaagataaattccgggcagttgtcgagatgtagtgcaaccttgtcgcctttgcgaatccccagcgtataaaacaggtttgccgtgcggttaatctcctgatttaactcaagataactataccggttaacgactccgccgctggattcacaaatcagcgccgttttatgaccgtaaacgtccgcaagatcgtcccacatttgacgtagatgttgtccgccaatgatatccattgcacctctatccatttttgttcgtttgttattgggcgggcgctagtcaggcaagccgactgacgccacgcgtttagtcctcaactttggccagacctttgctgaccaactcctgaatgtcgttttcgctgtagccgatatttttcaaaatggcagccgtgtccatgccatgtgagggcattccgcgccagatttgtccggggttatttttgaatttcggcatgatgttcggccctttgcaggtgcgaccatccatcgtttgccactgagtgattgattcgcgagccacatactgtggattgctttccagttccggtacggtcagcactttggcgcaggcgatattcagttcagcaaagcgttcttttacttccgcgatggtatgtgtcgccagccaggcatcgagtttctcttcaaccagtgggccgtaagggcattcgatacggtggataagctgagtgccttccgggatttctggcgtgccaagcagatgtgcgaggccaatatctttaaagcactcttcaatttgggtaatgcccaccagttccatcacgatgtagccgtcggcacatttatacagaccgcaaccggcgtagtagggatctttacctttgctcatgcgcgggcacatttcgccgccgttgaagtaatccatcatgaagtactggcccatacgcagcatcacttcatacatggcgatgtcgatactttcgcctttaccggtttcacgcactttatgcagtgctgccagcgccgccgtggtggcggtcaggccagaaaagtaatcggcggtatacgggaaggcaggcattggctggtcaacatcaccgttctgaatcaggtaaccactaaaggcctgggcgatagtgttataggccggaagattggtgtactcctcggtgccgtactgaccaaaaccggacaggtgagcgataaccagtttcgggttgtgctgccacagtacttcatcggtaatgccacgacgggcaaaggccggacctttactggcttcgatgaagatatcggtggtttccattaatttcagaaacgcttcgcggccttcatctttgaaaatatttaacgacagcgcgtgcaaattgcggcgggagagttgcgggtagttcggttgaacgcgaatggtgtcggcccaggcgacgttctcgatccagataacttccgcgccccattctgcgaacatttgcccggcaaacggtccggcgatttcgataccggagaagacaacgcgcaatccggccaacggcccgaatttcggcatgggtagatgatccattatttgctcctgaaaaatttatgtagcgcatgactgccggatgcggcgtaaacgctttatccggcctacattcgtgctcccgtaggcctgataagacgcatcagcgtcgcatcaggcagcgcacggacttagcggtattgcttcagcaccgcacgacccagcgtcaggatctgcatttcgtcagatcccccggagacgcggtctacacgcagatcacgccagaagcggctgatgcggtggttgcccgcaatcccgacaccgcccagcacctgcattgcgctatccacaacttcaaatgccgcattggcgcagaagtatttgcacatcgctgcatcgccagaggtgatggtgccgttgtctgctttccacgctgcttcatacagcatgtttttcatggagtttaatttgatcgccatgtgggcgaatttttcctgaatcaactggaaacgaccaatagcctcgccaaactgcacgcgctgattggcgtagcgcgccgcatcttcaaaggcgcacatcgccgtaccgtagttggtgagggctaccaggaaacgttcatggtcgaactcttctttgacgcggttaaagccgttaccttcccgaccgaacatgtctttctcgtccagttccacgtcgtcaaaggtgatttcacagcagctatccatacgcagaccgagcttttcaagtttggtcactttgatgcccggtttgctcatatcaacaaaccattcggtgtagacaggtttgtccggagaagccccgtcgcgcgccatcaccacgatgtacggggtgtaggcgctgctggtaataaaacacttactaccattaagataaatcttaccatttctacgggtataagtcgttttcaggctacccacgtcggagcccgcgcccggttcggtaatcgctgagttccacatctgcttaccggtgccgcggaaagccataattttgtcgatctgctcttgtgtgccttcgcgcaggaaggtgttgaacccgcccggcaactggtacagcacataggttggtgcccccagacgtcccagctccatccacacggcggcgagagtaacaaaccccgcgtccagaccaccgtgctcttcagggatcagcagactgtcgatacccatatccgccagtgctttgacaaaacgttccgggtagacgctgtcacggtcgcactcggcaaaataggcctcccagttttcgctggccatcagttcgcggataccggcgacaaacagttcctgctcatcatttaaattaaaatccatctttcaacctcttgatattttgggggttaattaatctttccagttctgtttcgcgtctttaataaaggagagcgtcaccataatgttgacgaagaacagcgggcatcctccggcgataatggcggtttgaatcggtttcaggccgccgagcgccagcagaacaataccgataatgccaaccagaattgaccaaccgatacgcaccagcagaggtggttcttcaccatcgcgtacttcgcggcaagtggacatcgccagggtataagagcaggcgttaaccagcgtaacggtggcaataaagcagaggatgaagaagccccacatggtggcggtgctgagtggcagagcggcccaggtttcaatgatggcgcgcgccacaccgtactgttcgatcagatttggaatgttgatgatgtttttatctatcaacagcagagtgttactaccgagtacagtccacaggatccaggttgacgctgtcagccccagcaccatgccgaagcacagttcacgcacagtacgaccacgggagatgcgggcgaggaagatactcatctggatagcataaatcacccaccatgcccagtagaacacggtccagccctgcgggaagccgcctttagcgatgggatcggtatagaacaacatgcgcggcagatacatcagcaacatccccaccgaatcggtgaagtagttcatgatgaagctggcaccgctgacaatgaacacccaacccagcatcaggaagctcaggtaactacgcacgtcactggcgatacgtacccctttttgcagaccgcaagcgacgcaaatggcgttgaggataatccagcaggtaatgatgatagcgtccagttgcagggtatgcggaatgccaaacaaccattgcatacactcggtcaccagcggcgtggcaaggcccagactggtacccatcgcgaagatcaaggcgacgagatagaagttgtcgacgatagtgccgaacaaccctttggcgtgtttttcacctaccagcggcaccagtgtcgagctggggcgaatcacttccattttgcggacaaagaagaagtaagcgaaggcgactgaaaggaagctgtaagtggcccacggcagaggtccccagtggaacaagctgtaagccagccccaactctttcgcccctgtcgagttcggttctaagccaaacggcggggtggagatgtagtagtagatctcaatcgatccccagaacagtacggcagcagacgtacaggaggcgaacatcataaagatccaactggcggtgctaaattctggcggttcgttacctaaacgctttttggcatacgggccaaacaccagccagaaccaaccgaaaagcatcaccaccatataccattcaaatgcccatccccatacattggtgacgtaactgaatacagcattaataacgacattcgctgcatccagatctctgactgtaagccaacaaagtatgccgacgattattaacggcggaaagaaaaccttcggttctattcccgtttttctcttttcattcttcatgagttaattccactgtgaaaacgaatatttattttgcgttcccgtttgttttatttttgttaacatttaatataattattattaacctcgtggacgcgttaatggctaactcataatgggtattcaataagctgtattctgtgattggtatcacatttttgtttcgggtgaatagagggcgttttttcgttaattttgattaataatcagtttgttatgctctgttgtgagtaaaaaataacatctgactttcaatattggtgatccataaaacaatattgaaaatttctttttgctacgccgtgttttcaatattggtgaggaacttaacaatattgaaagttggatttatctgcgtgtgacattttcaatattggtgattaaagttttatttcaaaattaaagggcgtgatatctgtaattaacaccaccgatatgaacgacgtttccttcatgatttctggagatgcaatgaagattattacttgctataagtgcgtgcctgatgaacaggatattgcggtcaataatgctgatggttcattagacttcagcaaagccgatgccaaaataagccaatacgatctcaacgctattgaagcggcttgccagctaaagcaacaggcagcagaggcgcaggtgacagccttaagtgtgggcggtaaagccctgaccaacgccaaagggcgtaaagatgtgctatcgcgcggcccggatgaactgattgtggtgattgatgaccagttcgagcaggcactgccgcaacaaacggcgagcgcactggctgcagccgcccagaaagcaggctttgatctgatcctctgtggcgatggttcttccgacctttatgcccagcaggttggtctgctggtgggcgaaatcctcaatattccggcagttaacggcgtcagcaaaattatctccctgacggcagataccctcaccgttgagcgcgaactggaagatgaaaccgaaaccttaagcattccgctgcctgcggttgttgctgtttccactgatatcaactccccacaaattccttcgatgaaagccattctcggcgcggcgaaaaagcccgtccaggtatggtcggcggcggatattggttttaacgcagaggcagcctggtcagaacaacaggttgccgcgccgaaacagcgcgaacgtcagcgcatcgtgattgaaggcgacggcgaagaacagatcgccgcatttgctgaaaatcttcgcaaagtcatttaattacaggggatgctatgaacacgttttctcaagtctgggtattcagcgataccccttctcgtctgccggaactgatgaacggtgcgcaggctttagctaatcaaatcaacacctttgtcctcaatgatgccgacggcgcacaggcaatccagctcggcgctaatcatgtctggaaattaaacggcaaaccggacgatcggatgatcgaagattacgccggtgtcatggctgacactattcgccagcacggcgcagacggcctggtgctgctgccaaacacccgtcgcggcaaattactggcggcaaaactgggttatcgccttaaagcggcggtgtctaacgatgccagcaccgtcagcgtacaggacggtaaagcgacagtgaaacacatggtttacggtggtctggcgattggcgaagaacgcattgccacgccgtatgcggtactgaccatcagcagcggcacgttcgatgcggctcagccagacgcgtcacgcactggcgaaacgcacaccgtggagtggcaggctccggctgtggcgattacccgcacggcaacccaggcgcgccagagcaacagcgtcgatctcgacaaagcccgtctggtggtcagcgtcggtcgcggtattggcagcaaagagaacattgcgctggcagaacagctttgcaaggcgataggtgcggagttggcctgttctcgtccggtggcggaaaacgaaaaatggatggagcacgaacgctatgtcggtatctccaacctgatgctgaaacctgaactgtacctggcggtggggatctccgggcagatccagcacatggttggcgctaacgcgtcgcaaaccattttcgccatcaataaagataaaaatgcgccgatcttccagtacgcggattacggcattgttggcgacgccgtgaagatccttccggcgctgaccgcagctttagcgcgttgatccactctggcagggctgcattttggccctgccgctgacagggagctcttatgtccgaagatatctttgacgccatcatcgtcggtgcagggcttgccggttcggttgccgcactggtgctcgcccgcgaaggtgcgcaagtgttagttatcgagcgtggcaattccgcaggtgccaagaacgtcaccggcgggcgtctctatgcccacagtctggaacacattattcctggtttcgccgactccgcccccgtagaacgcctgatcacccatgaaaaactcgcgtttatgacggaaaagtcagcgatgactatggactactgcaatggtgacgaaacctcgccatcccagcgttcttactccgttttgcgcagtaaatttgatgcctggctgatggagcaggccgaagaagcgggcgcgcagttaattaccgggatccgcgtcgataacctcgtacagcgcgatggcaaagtcgtcggtgtagaagccgatggcgatgtgattgaagcgaaaacggtgatccttgctgatggggtgaactccatccttgccgaaaaattggggatggcaaaacgcgtcaaaccgacggatgtggcggttggcgtgaaggaactgatcgagttaccgaagtcggttattgaagaccgttttcagttgcagggtaatcagggggcggcttgcctgtttgcgggatcacccaccgatggcctgatgggcggcggcttcctttataccaatgaaaacaccctgtcgctggggctggtttgtggtttgcatcatctgcatgacgcgaaaaaatcggtgccgcaaatgctggaagatttcaaacagcatccggccgttgcaccgctgatcgcgggcggcaagctggtggaatattccgctcacgtagtgccggaagcaggcatcaacatgctgccggagttggttggtgacggcgtattgattgccggtgatgccgccggaatgtgtatgaacctcggttttaccattcgcggtatggatctggcgattgccgccggggaagccgcagcaaaaaccgtgctttcagcgatgaaaagcgacgatttcagtaagcaaaaactggcggaatatcgtcagcatcttgagagtggtccgctgcgcgatatgcgtatgtaccagaaactaccggcgttccttgataacccacgcatgtttagcggctacccggagctggcggtgggtgtggcgcgtgacctgttcaccattgatggcagcgcgccggaactgatgcgcaagaaaatcctccgccacggcaagaaagtgggcttcatcaatctaatcaaggatggcatgaaaggagtgaccgttttatgacttctcccgtcaatgtggacgtcaaactgggcgtcaataaattcaatgtcgatgaagagcatccgcacattgttgtgaaggccgatgctgataaacaggcgctggagctgctggtgaaagcgtgccccgcaggtctgtacaagaagcaggatgacggcagtgtgcgcttcgattacgccggatgtctggagtgcggcacctgtcgcattctggggctggggtcggcgctggaacagtgggaatacccgcgcggcacctttggtgtggagttccgttacggctgatgttggtttgatacgtaacgccgcactgactctcattgcaaaaaacaggaataaccatgcaaccgtccagaaactttgacgatctcaaattctcctctattcaccgccgcattttgctgtggggaagcggtggtccgtttctggatggttatgtactggtaatgattggcgtggcgctggagcaactgacgccggcgctgaaactggacgctgactggattggcttgctgggcgcgggaacgctcgccgggctgttcgttggcacatcgctgtttggttatatttccgataaagtcggacggcgcaaaatgttcctcattgatatcatcgccatcggcgtgatatcggtggcgacgatgtttgtttcatcccccgtcgaactgttggtgatgcgggtacttatcggcattgtcatcggtgcagattatcccatcgccacctcaatgatcaccgagttctccagtacccgtcagcgggcgttttccatcagctttattgccgcgatgtggtatgtcggcgcgacctgtgccgatctggtcggctactggctttatgatgtggaaggcggctggcgctggatgctgggtagcgcggcgatcccctgtttgttgattttgattggtcgattcgaactgcctgaatctccccgctggttattacgcaaagggcgagtaaaagagtgcgaagagatgatgatcaaactgtttggcgaaccggtggctttcgatgaagagcagccgcagcaaacccgttttcgcgatctgtttaatcgccgccattttccttttgttctgtttgttgccgccatctggacctgccaggtgatcccaatgttcgccatttacacctttggcccgcaaatcgttggtttgttgggattgggggttggcaaaaacgcggcactagggaatgtggtgattagcctgttctttatgctcggctgtattccgccgatgctgtggttaaacactgccggacggcgtccattgttgattggcagctttgccatgatgacgctggcgctggcggttttggggctaatcccggatatggggatctggctggtagtgatggcctttgcggtgtatgcctttttctctggcgggccgggtaatttgcagtggctctatcctaatgaactcttcccgacagatatccgcgcctctgccgtgggcgtgattatgtccttaagtcgtattggcaccattgtttcgacctgggcactaccgatctttatcaataattacggtatcagtaacacgatgctaatgggggcgggtatctcgctgtttggcttgttgatttccgtagcgtttgccccggagactcgagggatgtcactggcgcagaccagcaatatgacgatccgcgggcagagaatggggtaaattgttcagatttctctcttttctgaatcaatattattgactataagccgcgtgaatatatgactacactttgtgggaaaacaaaggcgtaatcacgcgggctacctatgattcttataatttatgcgcatccgtatccgcatcattcccatgcgaataaacggatgcttgaacaggcaaggacgctggaaggcgtcgaaattcgctctctttatcaactctatcctgacttcaatatcgatattgccgccgagcaggaggcgctgtctcgcgccgatctgatcgtctggcagcatccgatgcagtggtacagcattcctccgctcctcaaactttggatcgataaagttttctcccacggctgggcttacggtcatggcggcacggcgctgcatggcaaacatttgctgtgggcggtgacgaccggcggcggggaaagccattttgaaattggtgcgcatccgggctttgatgtgctgtcgcagccgctacaggcgacggcaatctactgcgggctgaactggctgccaccgtttgccatgcactgcacctttatttgtgacgacgaaaccctcgaagggcaggcgcgtcactataagcaacgtctgctggaatggcaggaggcccatcatggatagccatacgctgattcaggcgctgatttatctcggttcggcagcgctgattgtacccattgcggtacgtcttggtctgggatcggtacttggctacctgatcgccggctgcattattggcccgtgggggctgcgactggtgaccgatgccgaatctattctgcactttgccgagattggggtggtgctgatgctgtttattatcggcctcgaactcgatccacaaaggctgtggaagctgcgtgcggcagtgttcggctgtggcgcattgcagatggtgatttgcggcggcctgctggggctgttctgcatgttacttgggctgcgctggcaggtcgcggaattgatcggcatgacgctggcgctctcctctacggcgattgccatgcaggcgatgaatgaacgcaatctgatggtgacgcaaatgggtcgcagtgcctttgcggtgctgctgttccaggatatcgcggcgatcccgctggtggcgatgattccgctactggcaacgagcagtgcctcgacgacgatgggcgcatttgctctctcggcgttaaaagtggcgggtgcgctggtgctggtggtattgctggggcgctatgtcacgcgtccggcgctgcgttttgtagcccgctctggcttgcgggaagtgtttagtgccgtggcgttattcctcgtgtttggctttggtttgctgctggaagaggtcggcttgtcgatggcgatgggcgcgtttctggcgggcgtactgctggcaagctcggaataccgtcatgcgctggagagcgatatcgaaccatttaaaggtttgctgttggggctgtttttcatcggtgttggcatgtcgatagactttggcacgctgcttgaaaacccattgcgcattgtcattttgctgctcggtttcctcatcatcaaaatcgccatgctgtggctgattgcccgaccgttgcaagtgccaaataaacagcgtcgttggtttgcggtgttgttagggcagggcagtgagtttgcctttgtggtatttggcgcggcgcagatggcgaatgtgctggagccggagtgggcgaaatcgctgaccctggcggtggcgctgtcgatggcagcaacgccgattctgctggtgatcctcaatcgccttgagcaatcttctactgaggaagcgcgtgaagccgatgagatcgacgaagaacagccgcgcgtgattatcgccggattcggtcgttttgggcagattaccggacgtttactgctctccagcggggtgaaaatggtggtactcgatcacgatccggaccatatcgaaaccttgcgtaaatttggtatgaaagtgttttatggcgatgccacgcggatggatttactggaatctgccggagcggcgaaagcggaagtgctgattaacgccatcgacgatccgcaaaccaacctgcaactgacagagatggtgaaagaacatttcccgcatttgcagattattgcccgcgcccgcgatgtcgaccactacattcgtttgcgtcaggcaggcgttgaaaagccggagcgtgaaaccttcgaaggtgcgctgaaaaccgggcgtctggcactggaaagtttaggtctggggccgtatgaagcgcgagaacgtgccgatgtgttccgccgctttaatattcagatggtggaagagatggcaatggttgagaacgacaccaaagcccgcgcggcggtctataaacgcaccagcgcgatgttaagtgagatcattaccgaggaccgcgaacatctgtcattaattcaacgacatggctggcagggaaccgaagaaggtaaacataccggcaacatggcggatgaaccggaaacgaaaccctcatcctaataaagagtgacgtaaatcacactttacagctaactgtttgtttttgtttcattgtaatgcggcgagtccagggagagagcgtggactcgccagcagaatataaaattttcctcaacatcatcctcgcaccagtcgacgacggtttacgctttacgtatagtggcgacaattttttttatcgggaaatctcaatgatcagtctgattgcggcgttagcggtagatcgcgttatcggcatggaaaacgccatgccgtggaacctgcctgccgatctcgcctggtttaaacgcaacaccttaaataaacccgtgattatgggccgccatacctgggaatcaatcggtcgtccgttgccaggacgcaaaaatattatcctcagcagtcaaccgggtacggacgatcgcgtaacgtgggtgaagtcggtggatgaagccatcgcggcgtgtggtgacgtaccagaaatcatggtgattggcggcggtcgcgtttatgaacagttcttgccaaaagcgcaaaaactgtatctgacgcatatcgacgcagaagtggaaggcgacacccatttcccggattacgagccggatgactgggaatcggtattcagcgaattccacgatgctgatgcgcagaactctcacagctattgctttgagattctggagcggcggtaattttgtatagaatttacggctagcgccggatgcgacgccggtcgcgtcttatccggccttcctatatcaggctgtgtttaagacgccgccgcttcgcccaaatccttatgccggttcgacggctggacaaaatactgtttatcttcccagcgcaggcaggttaatgtaccaccccagcagcagccggtatccagcgcgtatataccttccggcgtacctttgccctccagcgatgcccagtgaccaaaggcgatgctgtattcttcagcgacagggccaggaatcgcaaaccacggtttcagtggggcaggggcctcttccggcgattctttgctgtacatatccagttgaccgttcgggaagcaaaaacgcatacgggtaaaagcgttggtgataaaacgcagtcttcccagcccccgcaattccggtgaccagttatttggcatatcgccgtacatggcatcaagaaagaagggataggagtcactcgatagcaccgcttctacatcgcgtgcgcactctttggcggtctgcagatcccactgcggcgtgatccctgcgtgggccatcaccagctttttctcttcgtcgatttgcagcagaggctggcgccgcagccagttaagcagctcgtcggcatccggcgcttccagcagcggtgtcaggcgatctttcggtttattgcggctgatcccggcaaataccgccagcagatgcagatcgtgattgcccagcaccagacgtacgctgtcgcctaaggatttcacatagcgcagaacatccagcgaacccggcccgcgcgcgaccagatcgcccgtcagccagagggtatctttcccaggggtaaattctactttatgcagcaatgcgatcagttcatcgtaacaaccatgaacgtcgccaataaggtatgtcgccatattcttttaatgaatgagtgtgggaacggcgagtcggaatacgggaatgtcgatgctgaaagggacgccattttcatcgatcatttcgtagtgaccctgcatggtgcccagcggggtttcaatgattgcaccgctggtgtactggtactcttcgccaggcgcgataagtggctggacgccaaccactccttcgccctggacttcggtttcacggccattgccattggtgatcagccagtaacgccccaacaactgcactggcgctcgccccagattgcgtatggttacggtataagcaaaaacgtaacgttcattatcaggtgaagattgagcctcaatgtagacgctttgaacctgaatacacactcggggcgaattgatcatcgttaactctcctgcaaaggcgcgttctccgccagatagttcgccatctggcaatattgcgcgacagagatattttccgctcgcatcgccgggtcgatccccattcccgttaacacctcgacgctaaacaggttgccgaggctgttacgaatggttttacgacgctggttaaaggcttcggtggtgatgcggctcaacacacgaacatctttaaccgggtgaggcatcgttgcatgaggaaccaggcgcacgacggcggaatccactttgggtggtggtgtaaaggctgacggcggtacttccagtaccgggatcacattgcaatagtattgcgccatgacgcttaatcgaccatacgctttgctgttcggtcctgcaaccagacgattcaccacctctttttgcaacataaagtgcatgtcggcaatggcatcagtatagctaaacagatggaacatcaacggcgtggagatgttataaggcaggttgccgaaaacacgcagcggctgacccattttctcggccagttcaccaaagttaaaggtcatcgcatcctgctgataaatcgtcagtttcgggcctaagaatggatgcgtttgcagacgtgccgccagatcgcggtcaagttcgatgaccgtcagctggtccagacgttcgccgaccggttcggtcaatgccgccagaccggggccgatttcgaccatcgcctggcccttttgcgggttaatggcagacacaatactgtcgatcacgaactgatcgttgagaaagttttgcccgaagcgtttacgggctaagtggccctggtggactcgattattcattgggtgttaacaatcattttgatggcgagattaagcgccgtaataaaactgccgacatcggctttgccacgtcccgccagttcaagcgcggtgccgtggtccactgatgtgcgaataaagggcaggcccagcgtaatgttcacaccgcgcccgaagccctggtattttagcacgggaagaccctgatcgtggtacatcgccagcacggcgtcggcgttatcaagatatttcggctgaaacagggtatcggcaggcagcggcccgttgagtttcatcccctgcgcccgcagctcattgagcaccggaataatggtgtctatctcttccgtacccatatgaccgccttcgcccgcgtgcggattcagcccgcagaccagaatgcgcggttcggcaataccaaatttggtccgcaaatcgtgatgcaaaatagcaatcacttcgtgcaaaagtgcaggggtgatagcgtctgcgatatcgcgcagcggtaaatgcgtcgttgccagcgccacgcgaagttcttcggtcgccagcatcatcaccacctttttcgcctgcgaacgctcttcgaaaaactcggtatgaccggtaaaaggaatgccagcgtcgttaataacgcctttatgcaccggacctgtgatcagcgcggcaaattcgccgttcagacaaccatcgcacgctcgcgccagcgtttccaccacataatgcccattttcaaccgctaactgccccgcagtgacaggtgcacgtagcgcgacaggaagtagcgttaatgtgcccgcagtttgcggttgtgcaggggagttgggggaataagggcggagggtgagcggcaaaccgagcatcgctgcccggttggtaaggagagtggcatcggcacaaacaaccagttcgaccggccactcacgctgtgcaagctggacaactaagtccgggccaatcccggcgggctcgccgggagtgatcacaacacgttgggttttaaccattagttgctcaggattttaacgtaggcgctggcacgttgttcctgcatccagcttgctgcttcttccgagaacttacggttcatcagcatgcggtatgcacgatctttctgcgcagcgtcggttttatcgacattacgggtatccagcagttcgattaaatgccagccgaatgaagagtgaaccggtgcactcatttgacctttgttcaggcgagtcagggcgtcacggaaggccggatcgaaaatatctggtgtagcccagccgagatcgccgccctggttagcagagcctggatcctgagagaactctttcgctgcggcagcaaaagtcgttttaccactcttgatatcagcagcaatctgttccagtttcacacgggcctgttcgtcagtcatgatcggcgacggtttcagcagaatatggcgagcatgaacttcggtcaccgagatatttttgctttcgccgcgcaggtcgttaactttcagaatatggaagccaacgccggaacgaatcgggccaacaatgtcgcctttcttcgcggtgcttaatgcctgggcgaagatcccgggcaactcctgaatacggccccagcccatctggccgccgttcagcgcctgctggtcggcagaatgagcaatcgccagcttaccgaaatcagcgccgttacgcgcctgatcgacaatggcgcgcgcctggctttccgcttcgttcacctgatcagaggtcgggttttccggcagcgggatcaggatgtggctcaggttcagctcagtgctggcgtcgttttggttacccacctgctgcgccagggattcgacttcctgcggcaggatggtgatgcgacgacgcacctcgttgttacgcacttcagagataatcatctctttgcggatctggttacgataggtgttgtagttcagtccatcgtaagccagacggctgcgcatctgatccagcgtcatgttgttctgtttcgcgatgttagcaatcgcctgatccagctgctcatcggagattttcactcccattttctgccccatctgcaggatgatttgatccatgatcaaacgttccatgatttggtggcgcagcgtcgcgtcatcaggaagttgctgccttgcctgagcagcgttcagttttaccgactgcattaatccatcaacgtcgctttccagcacgacgccgttattgacgacggctgcgactttatcgactacctggggggcagcgaaactggtattcgcgatcatggcgataccgagaagcagcgttttccagttcttcatactttttccatttcaattaaccgcactgcggattacgtggtaaatcaacaaatcacaaagtgttttgatacggcagaatgttcgaacgcagcatctcttgcgtacccagaccgtagttggagctcaggccgcgaagttcgatgttaaagccgattgcgttgtcatataccgcatgttgtttatcgttatcccaaccgttcagcttccgctcgtaaccgacgcgaattgcatagcagcaggagctgtattgcacacctaacatagagtcggcttgcttgttagcattggtgtcgtagtagtaggccccaacaatggaccaacgatcggcaattggccagctggcgacagcacctacctgcgaaataccattcttatattgctcagcagtggaatagtacttaggcagcgtagcctgaatatattccgggctggcgtaacggtaattcagctgtaccagacggtcttcatcccgacggtattcaatgctggagttactggtcgctacgttatccagacgtgtatcgtactgaatcccgccacgcaatccccaacgctcggagatacgccagtaagtatcgcctgcccacaccagtgaacccgttttgtcgtcattctcccatgttatgttgtcatcgccagtgcgagactccgtgaaatagtagatttgaccaacggaaatattaaaacgttcaacggcagcatcatcatatatgcgagatgtgacaccggtcgtcacctggttagcggaggcaatacggtcaagaccgccgtaagtccggtcccggaacaggccagagtagtcagattgcagcagagacgagtcgtagttatagatgtcgctctgatcgcgatacggcacgtacaaatactgcgcgcgcggttccagcgtttgggtataacccggagccagcatttccatatcgcgttcaaagaccattttgccgtcaactttgaattgcggcattacgcggttaacggattcgtccagcttggtcgtgtttctggagttataccagtcaagattggtttgctgataatgggttgccagcaacttcgcttcggtattgatgctgccccagttattagagagcggcaaattgatggtcggttccaggtgaacacgggttgcttcaggcatgtcgtctctggtgttaacaaagtgcactgcctggccgtaaatacgcgtatcaaacggaccaacatcattctggtagtaattaacgtctaactgcggctctgccgagtagctactggtgttctgttcgctgaaaacctggaactgcttggttgaaacggtggcattgaagttttgcaccgcatagccaacgctgaatttttgcgttgcgtagccgtcagtactggaaccgtacttgttatcgaaatcattgaagtagctaggatcgctgaccttggtgtagtcgacgttgaaacgccacacctgatccatgaccccggagtggttccagtagaataaccaacgacgtgaactgtcatcgttcgggtgttcatcttcatagactttatctgaaggcagatagtccagttccatcaagccagcgcccgcctgggagaggtagcggaattcgttctcccacatgatgttgccacgacgatgcatataatgcggcgtgatggtggcatccatatttggcgcgatgttccagtaatatggcaggtagaactcaaagtagttggtggtggtgtacttggcgttcgggatcaagaaaccagagcgacgtttgtcacccaccggcaactgcaaataggggctataaaagatcggtaccggacccaccttaaagcgggcgttccagatctccgcaacttgttcttcgcggtcatgaataatttcgctacctaccacgctccaggtgtcagaacccggcagacaggaggtaaagctaccgttatccagaatggtatagcggttttcgccacgttgtttcatcaggtccgctttaccgcgaccctggcgacccaccatctggtaatcaccttcccagacgttggtatctttggtgttcagattcgcccagcctttcggccctttgaggatcacctggttatcgtcgtaatggacattaccgagcgcatcaacggtacgtaccggctccggttgtcctggtgcctctttttgatggagctgcacttcgtcggcctgcagacggctgttaccctgcatgatatccacgctgccagtaaacacggcgtcatccgggtagtcccctttcgcgtggtcagcattgatagtcacgggtaagtcattggtatcgccctgtaccagaggacggtcatagcttggcacgcccaacatgcactgtgaggcgaggtcggctgccagtccctgttgactataaagggcggtggcaatcatggtggccaggagagtggggatacgttttttcatacgttgattttattgttccatcatcggtaacgttgcgcgtgacaaacggtcagagactaacgtactcgtcatctctacgctagtgttaatcctgtccgaatagcgtcagtggtgttaggcacggcattgaatgacaggtatgataatgcaaattataggcgatgtcccacaattgaccgcagccggaaaacggtaaaagcacctttatattgtgggagatagccctgatatccgtgtgtcgatttggggaatatatgcagtattggggaaaaatcattggcgtggccgtggccttactgatgggcggcggcttttggggcgtagtgttaggcctgttaattggccatatgtttgataaagcccgtagccgtaaaatggcgtggttcgccaaccagcgtgagcgtcaggcgctgttttttgccaccacttttgaagtgatggggcatttaaccaaatccaaaggtcgcgtcacggaggctgatattcatatcgccagccagttgatggaccgaatgaatcttcatggcgcttcccgtactgcggcgcaaaatgcgttccgggtgggaaaatcagacaattacccgctgcgcgaaaagatgcgccagtttcgcagtgtctgctttggtcgttttgacttaattcgtatgtttctggagatccagattcaggcggcgtttgctgatggttcactgcacccgaatgaacgggcggtgctgtatgtcattgcagaagaattagggatctcccgcgctcagtttgaccagtttttgcgcatgatgcagggcggtgcacagtttggcggcggttatcagcagcaaactggcggtggtaactggcagcaagcgcagcgtggcccaacgctggaagatgcctgtaatgtgctgggcgtgaagccgacggatgatgcgaccaccatcaaacgtgcctaccgtaagctgatgagtgaacaccatcccgataagctggtggcgaaaggtttgccgcctgagatgatggagatggcgaagcagaaagcgcaggaaattcagcaggcatatgagctgataaagcagcagaaagggtttaaatgaccctgtaaatgatgctgagtaactgcccacgattaaaggtggccgccctggcggtcacttctttgagaaaaggcgtttactcagaatggtggacaggctcaatgcacggtttacgggaggggttctgtaggttttatcgcgttgaccctgcttaaggttgagagctttacgacgagcggaattatatttttacgtcttaaaaataaaaaacacatacctgaatgagcgatttttgaaagtatatttattcagaacgcgcatcatgagtttttaactcaatgcgaggctattaccatgaaagtatcagttccaggcatgccggttacacttttaaatatgagcaagaacgatatttataagatggtgagcggggacaagatggacgtgaagatgaatatctttcaacgcttgtgggagacgttacgccatctgttctggtcagataaacagactgaggcttataaacttctgttcaatttcgtgaataaccagactggcaacatcaacgcctcagaatactttactggggctatcaacgagaatgagagagaaaagtttatcaatagcctggaattattcaataaacttaaaacatgcgcaaaaaatccggatgagttggtcgcaaagggcaatatgcgctgggtcgcccagaccttcggggatatcgagttaagtgtcacttttttcattgaaaagaataagatatgtactcagacgttgcagctgcataagggccaaggtaacttgggcgttgatcttagaaaggcttaccttcccggcgttgacatgagggattgttaccttggtaaaaaaacaatgaaaggtagcaatgatatcctttatgagagacctgggtggaatgctaacctgggcgtgctaccccggacggtgctaccccggacggtgctaacccggacggtgctaacctggacggtgctaccgtgaacggtgctacctccttatatgatgaggtaattattattaataaaatcccccccaaaaaaattgatactaaaggagttgctactgaagaagttgctactaaaaaagtactgctgaacaaattactgacaacgcaattattgaatgagccagaataagctaaggttgaaggggctggaacgccccttcaaccttagcagtagcgtgggatgatttcacaattagaaagacctgcatgatgagctagagaagaggctagtgacgcaaggcgtcgtgcaggacacggatcaccgagatgggcatcgccaaccagactgctaattagcccatgaataacaatcagaaaggaccataacagacccgttaaaatgaaatataagagacggtcaacgggtgaagaaaaagttcaaaaattcgctgtggagcaggaagggaattaccgaatggaaagcgtagccacacgcaacaactgaaagcagtttggcagaaacaaaaaatccccggactcggggatttatgtacaagaggcagcccttaggatgagggtataaacgtacaggaaaggttaaaaatccgctggcgctttaaacgtcatactattgccatacgccggatgggtaatcgtcaacatctctgcatgtagcaacaaacgtggtgccatcgctctcgcttctggtgatgcataaaaacgatcgccgagaatcggatgacccagcgccagcatatgcacacgcaattgatgcgaacgcccggtaatcggttttaacaccactcttgccgtgttatccgccgcatactccaccacttcatattccgtctgcgcaggtttacccgtttcgtaacagactttctgtttcgggcggtttggccagtcgcaaatcagcggcagatccaccagaccttctgcgggggatggatgcccccagacgcgggccacatactgctttttcggctcgcgctcgcggaactggcgttttaactcccgctccgcggctttggtcagcgccactacaatcacgccgctggtagccatatccagacgatgcaccgattctgcctgcggataatcacgctgaatgcgcgtcatcacgctgtctttgtgctcttccagacgacccggcactgacaacaaaccgctcggcttgttgaccaccataatatggtcatcctgatacaggataaccaaccagggttcctgcggtggattgtagttttccatccccattttcggctccgttactgatgcgttacaacgatcaaacgcagggcatccagacgccaacctgcctgatccaggctttccattacctgctgacggttgctctcaatggcggtcagttcgtcgtcacgaatgttcgggttcactgcacgcagagcttccagacgagacagctcggcagacagtttttcgtcggcttcgttacgcgctgcatcaatcaatgcacgggcagatttctcgatctgcgcttcacccagttgaaggatagcgtgaacatcctgctgcacggcgttaaccagtttgctgccggtgtgacggttaaccgcgttaagctggcggttaaaggtttcaaactctacctgcgccgccaggttgttgccgtttttatccagcagcatacgtaccggcgtcggtggcaggaagcggttgagctgcaactgcttcggagcctgggcttcaaccacataaatcagttccaccaacagcgtacctaccggcaacgctttgttttttaacagtgaaatcgtgctgctaccggtatcgccagaaaggatcagatccagaccgttgcggatcagcggatgctcccaggtaataaactgtgcatcttcacgcgccagcgccacttcacgatcaaaggtgatggtgatgccatcttccgacaggccagggaagtccggcaccagcatatgatcggacggcgtcagcacgatcatgttgtcgccgcgatcgtcctgattgataccgataatatcgaacaggttcatggcgaaggcgatcaggttggtatcgtcatcctgctcttcaatgctttctgccagtgcctgggctttttcgccaccgttggagtggatttccagcaggcggtcacgaccctgttccagctgtgctttcagcgcttcatgttgctcgcggcagtttttgatcagatcgtcaaagccttcggtttgatccggtgaagccagatagttaatcagatcgttgtatacgctatcgtaaatagtgcgtccggtcgggcaggtgtgctcaaatgcatccagaccttcgtgataccagcgcaccagcaccgactgagcggttttctccagataaggcacatggatctgaatatcgtgcgcctggccgatacgatccagacgaccaatacgctgctccagtagatccgggttgaatggcaggtcaaacatcaccatgtggctggcgaactggaagttacgtccttcagaaccgatttctgagcacagcagtacctgtgcgccggtgtcttcttcggcaaaccaggcggcagcgcggtcacgttcgataatcgacataccttcgtggaacaccgcagcgcgaataccttcacgttcgcgcagtacctgctccagttgcagcgcagtggcagctttggcgcagatcaccagcactttctgagagcgatggctggtcaggtagcccatcagccactcaacgcgcggatcgaagttccaccaggtggcgttatcaccttcaaattcctgataaatacgctccgggtagagcatatcgcgagcacgatcttccgcacttttacgtgcgcccataatgccggagactttaatagccgtctgatactgcgtcggtagcggcagcttaatggtgtgcagctcgcgtttcgggaatcctttcacaccgttacgcgtgttacggaacagcacgcggctggtgccgtggcgatccatcagcatcgaaaccagctcctgacgggcgctctgggcatcttcgctgtcgctgtttgctgcctgcaacagcggctcgatatcctgctcgccgatcatctcgccgagcatgttcagttcgtcattgctcagtttgttacctgccagcagcatggcaacggcgtccgcaaccggacgataatttttctgctcttcaacgaactgcgcaaaatcgtggaaacggttcgggtccagcagacgcagacgggcgaagtggctttccatccccagctgttccggggtcgcggtcagcagcagaacgcccggcacgtgctctgccagttgttcaatggcctgatattcacggcttggcgcatcttcgctccacaccaggtgatgcgcttcatcgaccaccagcaggtcccattcggcttcacagagatgttccaggcgctgtttgctacgacgggcaaaatccagcgagcaaatcaccagctgttcggtgtcaaacgggttgtaagcatcgtgctgagcttcggcataacgctcatcatcaaatagcgcaaagcgcaggttgaaacggcgcagcatttctaccagccactgatgctgtaaggtttccgggacgataattagcacacgttcagcagcgccagagagcagttgctgatgcaggatcatcccggcttcaatggttttccctaaacccacttcgtcagccagcaggacgcgcggcgcgtggcggcgaccaacatcatgagcgatgttgagctgatgcgggatcaggctggtacgctgaccgcgcaggccgctgtacggcatacggaactgttcgctggaatatttacgcgcgcgataacgcagcgcaaagcggtccatacggtcaatctgcccggcaaacagacggtcctgcggtttgctgaacaccagtttgctatcaaggaaaacttcacgcagggctacgccggactcttcagtatccaggcgagtaccgatataggtcagcaagccattttcttcttttacttcttcgacttgcatctgccagccgtcatggctggtaatggtatcaccagggttgaacatcacgcgggtcacgggggaatcactgcgtgcgtacagacggttttcaccagtagatgggaaaagtaaagtgacagttcgcgcatccaccgcgacaacggttccaagtcccaattcgctttctgtatcgctgatccagcgttgaccaagtgtaaaaggcatatgtgttcggctctatatctttaattgcaggcaataaccacccgctaccgtgcttatgaggtagtggtgttattcaggtccaggaatggaaagggcgctatggtactggatggcaaagcattcgtcacgcatcaaaatggtatctggcgaactcttttttttgctcaaaatagcccaagttgcccggtcataagtgtagcaaaattatcctcaataaaagggagtattccctccgccacgggttgtagctggcgggtcagatagtgttcgtaatccagtggtgaacgttggtagtccagcggctccgggccgttggtggtccatacgtacttaatggtgccgcgattctgatattgcaaggggcgaccacgcttttggttttcttcatcggcaaggcgagcggcgcgtacatgaggcggcacattacgctgatactcgctcagcggacggcgaaggcgtttacggtaaaccagtcgcgcatccagttcacccgccatcagtttgtcgatggtttcgcgtacatattcctgatatggctcgttgcggaagatgcgcaggtatagctcctgctgaaactgctgggccagcggcgtccagtcggtgcgcacggtttccagccctttaaacaccatccgctgcttgtcgccctcctgaatcagtccggcataacgctttttactgccggtatcggctccgcgaatggttggcatcagaaaacggcagaaatgggtttcatactccagttctaatgcgctggtcagccgttgtttttgcagcgtttccgcccaccaggcgttaacgtgctgcaccagtgcacgaccgattttcgccgcttcttcttccgaatgtgcgcctttcagccagacaaacgttgagtcggtatcgccgtagataacgtcgtagccctgtgcttcaatcaacgctttggtttgccgcatgatctgatgaccacgcatggtgatcgacgatgccagccgcggatcgaagaagcggcaggcggtggtgccgagcacgccataaaaggcattcatgatgattttcagcgcctgcgacagcggtttgttaccctggcgtttggcttcatcgcgcccgtgccagatgttagtcacaatctccggcaggcaatgtttttctcgcgagaaccaggcatcgagaaaaccttcggtactgtgctctggatcaggctgcgccatgccttccaccagcccgacgggatcaatcagaaaggtgcggatgatcgacgggtacaggcttttatagtccagcaccagcactgaatcataaagccctggccgtgaatccatcacgtagccgccagggctggcgtgcggcggcacttcgccgagattaggcgcgacataaccagcgcgatgcattcgcggaaaatagagatgaccaaatgccgccaccgaaccgccgtgtcggtccaccggcaggccgttcaccgttgcccgttcgagtaaaaatggcatgatttcagttttgtggaagatctgcgtcaccagctcgcaatctttcaggttataagttgccagcgcaggtttatcttcggcgaaacggcggtcaatttcgtccattcgatcccacgggttatcgatagattttccttcgcctaatagctcctgagcgacagtttccagcgagaatgaagagaaattccagaacgcggatttcagcgcctcgataccgtcgataattagccgacctttagcctgggcaaaaaagacgccgtttttaaagccgtgctcgcgccactccagctcgctattatcgcgcccaagacgcagcggaagacggtaacgctcggcatgtttttgcagcattcgcagatcgaactgcaccacgttccaaccgatgatcacatcaggatcgtagttggcaaaccaggcgttgagtttttccagcaactgcgggcggctggcgacgtattccagttcgaaatcaagcgaggaggcgtcgccattctccggccccagcatataaacgatgcgctgcccgcagccttccaggccgatgcagtacagctcaccgtggcgggtggtttcaatatctatagaaacccacttgagcggcggacgatagtcgggatgcggtttcagacgggcattaacgatagtgccattgtgcatatcaccctcgacccacaccggtgaggtgataaaccgctccatcagatagcgttctggcggacgcacatcggcctcgtagacggtaacgccaccttcacgcaggcgcttttcgtaattcatcaattggcgatgggcgcgacagtaaaggccatacaccggctggcggtgaaaatcctttaacgccagcggtgtcaggcgaaagccttgttcaccctgcaaaatatgctgagcgcggggaacctgatcggcgggaataaacgccacggactcttgcggtgcaagcgtaacctgcaacggcccgttgtccgtcgccagccagaaggagacttctgtcccttgcggggtgtcccgccagtgtcgggttaagataaaacctgcctgcgccacgctgaaaatccatcaaaaaaccaggcttgagtatagcctggtttcgtttgattggctgtggttttatacagtcattactgcccgtaatatgccttcgcgccatgcttacgcagatagtgtttatccagcagcgtttgctgcatatccggtaactgcggcgctaactgacggcagaatatccccatataagcgacctcttccagcacgatggcgttatgcaccgcatcttcggcatttttgccccatgcaaacgggccgtgggaatggaccagaacgccgggcatttgcgctgcatcgataccctgtttttcaaaggtttctacgatgacgttaccggtttcccactcatattcgccgttgatttctgcgtcggtcattttgcgggtgcagggaatggtgccgtagaaatagtcggcgtgggtggtgccggttgctggaatcgactgacccgcctgcgcccagatggtggcgtggcgcgagtgcgtatgcacaatgccgccaatggaggggaatgcctgatagagcagccggtgagttggcgtgtcggaggagggctttttcgtaccttcaaccacttcaccggtttcgatgctaaccacgaccatatcgtcagcggtcatgacgctgtaatcgacgccggaaggtttgatcacaaagacgccgcgctcgcgatcaacggcgctgacgttgccccatgtgagcgtgaccaggttgtgttttggcagcgccaggttggcttctaatacctggcgtttgagatcttctaacatgttgactccttcgtgccggatgcgctttgcttatccggcctacaaaatcgcagcgtgtaggcctgataagacgcgccagcgtcgcatcaggcgttgaatgccggatgcgctttgcttatccggcctacaaaatcgcagcgcgtaggcctgataagacgcgccagcgtcgcatcaggcgttgaatgccggatgcgctttgcttatccggcctacaaaatcgcagcgtgtaggccagataagacgcgtcagcgtcgcatcaggcgttacataccggatgcggctacttagcgacgaaacccgtaatacacttcgttccagcgcagcgcgtctttaaacgctggcaggcgtgtgtcgttatcaatcaccgtgatttcaatgtcgtgcatctcggcgaattggcgcatatcgttgaggttcagtgcatggctgaagacggtatggtgcgcgccaccagcgaggatccacgcttcggaagcagttggcagatccggttgcgctttccacagcgcattcgccaccggcagtttcggcagggagtgcggtgttttcaccgtgtcgatgcagttaaccagtagacggtaacgatcgccgagatcaatcaagctggcgacaatcgctgggccggtttgggtattgaagatcaggcgggcaggatcgtccttaccaccaataccgagatgctgaacgtcgaggatcggtttctcttctgcggcgatcgacgggcagacttccagcatatgggagccgagcaccaggtcattacctttctcgaagtgataggtgtagtcctccataaaggaggtgccgccctgcagaccggttgacatcaccttcatgatgcgaagcagggcggcagttttccagtcgccttcgcccgcaaagccgtaaccctgctgcatcagacgctgtacggccagaccaggaagctgtttcagaccgtgcaaatcttcaaaggtggtggtgaacgcgtggaagccaccttgttccaggaaacgcttcatccccagctcaatacgcgccgcttccagcacgttctgtcgttttttgccgtggatttgtgtggcaggcgtcatggtgtagcagctttcgtactcatcgaccagcgcgttaacatcgccgtcgctgatggagttcaccacctgcaccagatcgccaaccgcccaggtattgacggagaaaccgaacttgatctgtgcggcaactttatcgccatcggtgaccgccacttcacgcatgttatcgccaaatcggcagactttcagatgacgggtatcctgtttagagaccgcctgacgcatccaggagccgatacgctcatgggcttgtttatcctgccagtgaccggtaaccacggcatgttgctgacgcatacgcgcgccaatgaagccgaactcgcgaccgccatgtgcagtctggttcaggttcataaagtccatatcgatactgtcccacggcagcgccgcgttgaactgggtgtggaattgcagcaacggtttgttgagcatggtcaggccgttgatccacattttggccggggagaaggtgtgcagccacaccaccagaccagcgcaacgatcgtcgtaattcgcgtcgcggcaaatagcggtgatttcatccggcgtggtgcccagcggtttcaacaccagtttgcagggcagtttcgcttccgtattcagcgcattaacgacgtgctcggcatgttgggtgacctgacgcagggtttccgggccatacagatgctggctgccaatgacaaaccacacttcataattatcaaaaatcgtcattatcgtgtccttatagagtcgcaacggcctgggcagcctgtgccggggcggaagttggaagatagtgttgttcggcgctcatcgcccattgctgatagcggcgataaagctgttcaaagcgttgtgcctgctcgctgcacggttgcagggttttctctaccgcactggccattttttgctgagctgatgggatgtctgcgtgcactttcgcggcgacggcagcaaaaatcgccgcaccgagcgcacagcactggtcagaggcaacaatttgcagcgggcgattcagcacgtcgcagcaggcctgcataatgacctggtttttccgcgcgatgccgcccagtgccatcacgttattaacggcgatcccctgatcggtaaagcactccatgattgcgcgtgcgccaaaggcggtggcagcaatcaaaccgccgaacagcagcggagcgtcggtagcgaggttaagatcggtaatcacccctttcaggcgttggttagcgttcggtgtgcggcggccgttaaaccagtcgagcaccaccggcaggtgatccagagacggatttttggcccatgcttcggtcagcgccggaagcagttgtttctggctggcgttgatttgcgttttcagttccggatgctgggcggcaagctgttccagcggccagccgagtacgcgaccaaaccaggcgtagatatcaccaaacgccgattggcctgcttccagaccgataaatccaggcaccacgctgccatcaacctgaccgcaaatacctttaactgcccgctcgccaacgctctgtttgtcggcaatcagaatgtcgcaggtggaagtaccgataacttttaccagtgcgttaggctgtgcgcctgcgccaactgcgcccatatggcagtcaaacgcgccgccggaaatcaccacgctttcaggcaggccgagacgctgcgcccattccgggcataaggtgcccaccggaatatcggcagtccaagtgtcagtgaacagcggggaaggcaaatggcgattgaggatcgggtccagctcatcaaagaaactggctggcggcaggccgccccagctttcgtgccacagagatttatgcccggcgctgcaacgtccgcgacgaatatcctgcgggcgggtggtaccggaaagcagagctggcacccagtcgcacagctcaatccacgatgcggcagattgcgccacggcgctgtcctggcgagtcacatgcaggatttttgcccagaaccattcgctggaataaataccaccaatgtagcgggagtagtcaacgttgcccggcgcgtggcacaaacgggtaatctcttccgcttcttcaaccgcagtgtggtctttccacaatacgaacatcgcgttcgggttttcggcaaactccgggcgcagcgccagcacgtttccgtcggcatcaatcggtgcgggcgtcgagccggtactgtcaacgccaatcccgaccacagctgcgcgctgttcgacgctaagctctgcaagcacggttttcagtgccgcttccattgactcaatgtagtcacgcggatgatgacggaactggttattcggggcatcacaaaattgccctttctgccaacggggataccactctacgctggtggcgatctcttcaccggtagcgcagtccaccgccaaagctcgcacagaatcactgccaaaatcgaggccaattgcaatcgccatcgtttcactccatccaaaaaaacgggtatggagaaacagtagagagttgcgataaaaagcgtcaggtaggatccgctaatcttatggataaaaatgctatggcatagcaaagtgtgacgccgtgcaaataatcaatgtggacttttctgccgtgattatagacacttttgttacgcgtttttgtcatggctttggtcccgctttgttacagaatgcttttaataagcggggttaccggttgggttagcgagaagagccagtaaaagacgcagtgacggcaatgtctgatgcaatatggacaattggtttcttctctgaatggtgggagtatgaaaagtatggctgaagcgcaaaatgatcccctgctgccgggatactcgtttaacgcccatctggtggcgggtttaacgccgattgaggccaacggttatctcgatttttttatcgaccgaccgctgggaatgaaaggttatattctcaatctcaccattcgcggtcagggggtggtgaaaaatcagggacgagaatttgtctgccgaccgggtgatattttgctgttcccgccaggagagattcatcactacggtcgtcatccggaggctcgcgaatggtatcaccagtgggtttactttcgtccgcgcgcctactggcatgaatggcttaactggccgtcaatatttgccaatacgggtttctttcgcccggatgaagcgcaccagccgcatttcagcgacctgtttgggcaaatcattaacgccgggcaaggggaagggcgctattcggagctgctggcgataaatctgcttgagcaattgttactgcggcgcatggaagcgattaacgagtcgctccatccaccgatggataatcgggtacgcgaggcttgtcagtacatcagcgatcacctggcagacagcaattttgatatcgccagcgtcgcacagcatgtttgcttgtcgccgtcgcgtctgtcacatcttttccgccagcagttagggattagcgtcttaagctggcgcgaggaccaacgcattagtcaggcgaagctgcttttgagcactacccggatgcctatcgccaccgtcggtcgcaatgttggttttgacgatcaactctatttctcgcgagtatttaaaaaatgcaccggggccagcccgagcgagtttcgtgccggttgtgaagaaaaagtgaatgatgtagccgtcaagttgtcataattggtaacgaatcagacaattgacggcttgacggagtagcatagggtttgcagaatccctgcttcgtccatttgacaggcacattatgcaagcattgctggaacactttattacccaatccaccgtgtattcattgatggcggtggtgttggtggcctttctggagtcgctggcgctggtcggtttgattctacccggtacggtgctgatggcggggctgggagcgctgattggcagcggcgagttaagtttctggcacgcctggctggcagggattattggctgcttgatgggcgactggatttctttctggctgggttggcgttttaaaaagccgttgcatcgctggtcatttctgaagaaaaacaaagcactacttgataaaactgaacatgcgttgcatcaacacagcatgttcaccattctggtcggtcgttttgttggcccgacgcgtccgctggtgccaatggtggcgggaatgctggatctgccggtggctaaatttattacgccgaatattatcggctgcctgctgtggccgccgttttacttcctgccagggattctggcgggcgcggcgatcgatattcctgccggaatgcagagcggtgagtttaaatggttgctgctggcaacagcggtgtttttgtgggttggtggctggctgtgctggcggttatggcgcagcggtaaagcgactgaccgtttgagtcattatttgtcccgcggtcgtttgttgtggctgacgccgttgatttctgccatcggcgtggtggcgctggtggtgttaattcgccacccgttgatgccggtgtatatcgatattttgcgtaaagtggttggggtttaggagatagtcttgtgcgggttgcctgatgcgacgcttgccgcgtcttatcaggcctacaaaacgcactacccgtaggtcggataaggcgttcacgccgcatccgacagtgcatactaacccgtaatccccaatagtgccgaagcactcgccttaccgctcaacaactcattggtcataccctgccaggcgatgcgcccgtcggcgactactaccgagcgcgtggcgatccgcgccgcatcttccacgctgtgcgacaccatcaatagcgtcattttttgctgctggcagctcgtgctcaccagcgtcaacatctcctgacgtaacgccggatcgagcgcagagaacggttcatcgagcaataaaatcggctgttcgcgtaccagacaacgcgctaacgccactcgctgtcgctgaccgccggaaagctcgcccggtaaccgcgccattaaattatcaatccccatctggcgggcgatagcgtgcattttcccctgctgtaccgcgttcagtttcaatcccggatttagccccagcccgatgttctgtgcgaccgtcaggtggctgaacaggttgttctcctgaaacagcatcgacaccggacggcgtgacggcggcatagttgtgtgatctacgccatcgatagtcagcgaaccgctggctggcgtcagaaaaccggcgatcaaattcagcagggtacttttacccgcgccgcttggcccgaggatcgccacctgctcgccgcgttccaccgttaagctaaaacgcatcggcaaatggtggtaaagccaggtgatatcagtcagttttaacatttcgccccggtagtttttcaatcacggtaaacagcagaaaacagagcagcagcagaattaacgcggtgaccgcaccgtcctggctgcgataggagccaatttgctggtagagataaaacggcagggtgcggaaatcatcgttaccgaacaacgccaccacgccaaaatcaccaatcgacagcacgcatgcaaaggccagcgcctgcgccagtggacgtttcagggcgcgcagctccaccacttttaagcgtgaccagccttcaatccccagcgactgacataacatgctgtagcgggcggtgatatcgcgcatcgggttttccagcactttcagcgcataagggatcgccattaacgcattggtgaaaatcacaatgccgtcagcagattgtggcaggccgatagtgttgttgagcagtaaaaagaagccggtagccagcacaatccccggcatggcgaggatcaacatgccgctcatctccagcacctgacccgccagcattttctgccgcgcccgcagttcgcgactgctccatagcagcatcatggtcagcactacgcacaatacacctgccgccagcgcaatacgcaacgaggtccacagcgcctgccacagcaccggttgtgccagcacttccggcaactggcgatttaccccatcgacgatcaccgccagtaacggtggcagcaacagcagcagcgccagcacaattaacaccgtgtcgcaaatgcggctatgcagacgatcgtccgggtcgcgccagccttgcagcagcgtggtgccgggcgcaatggccttactcaatcgctgactcaacagcaccagcccgaggcagcacaccatctggagcagcgccagcattgccgcgcgggcaggatcgtagtcgtaactcagcgcctgatagattgccagctcgatagtggtcgcctgcggaccgccccccagcgatagcacggtggcgaagctggcgaaacagagcataaagataagcgcagcaaccggcgggatttgtcgccgtaaccacggccattcgacgaagcggaaaaaatgccagctacgcatcccaagctgggcggcaagttgacgctgttcgccggggatgttttccagtgcctggagtaataagcggctcgccatcggcagattaaaaaacacatgggccagcaaaataccttgcaggccgtagggcgaaaaggtccactccagaccgagcgattggcagagtgttgccagccagccctggcgaccatagacgctaagaatgccgaaaacagcgaccaacaccgggaggatcaaggtcattgcacacagacgcaacagcgccagccgacccggaaagcgcctgcgatagagcgcgcgggcgaggaatatcgcgggtatgacagagagcagtgccgagagaaacgcctgccagaaggagaagcgcaccacatgccacagatagctgtcctgccagactgccacccagtcatcctgcggcgcgttccaccacagggcgagaaacgccgccagcgcaaccgctaccaccagcgtggtggcgcttacacctggaattaaccagccgggaattaacggctgacggcgcgttgccattcgctaatccatgcctgacgttgtgccgccacttcggctggcgtgaactccaacgtggttgcgggtttggtcaatttttcaaaaccggcaggcagcgtgacgtttgccaccggatacatccagttgccggttgggatcgcattctggaaagccggagaaaccataaactggaggaatttttgcgccagctccggctgcttgctggcagcggtgcgggcggcgacttccacttgcagatagtgaccttcgctgaagttcgcggcggcgtagttatctttcttctcttcgagaatgtgataagccggagaggtggtgtaactcagtaccagatcgctttcaccttttaaaaacaggccgtaggcttcgctccagcctttggtgaccgtgaccgttttcttcgccagtttctgccaggcttgtggggcgtcatcgccatagactttttgcatccatagcaacagacccagccccggtgtactggtgcgcggatcctgataaatcacccgccagttttgatcgctctcaaccagttctttcaggctttgtggcgggtttttcagtttgttcttgtcataaacgaaggcgaagtagccataatcaaacggtacgaaagtgtcattattccagccgccgggaacgttaacggcatccgctgccacaccgcttttggcaaacagtccggttttactggcggcgtctaacaggttgttatccagccccagcaccacatcggctttactgtttttgccttccatccgtagacggttgagaagcgaaacgccatcttccagcgccaccagtttcagttcgcaattacagtcggcttcaaaggcttttttaaccaccggaccaggcccccagtcggcggcgaaggaatcgtaggtataaacagtcagaacgggtttagcgaaaacgggcgctgtgcacagcaacagcaggggcagacatttttttaacactttgcacctcaaaaaagagtggcaaaggacttgagaaggagcctcaaatcccttcgccggcgttatccggatcaggttcgacgggtattttctcagcgcacgcgtacgcgtggcaccccgttgagaacggcgttagtgtagtgattttgttatcaaccagcaatcatggatccggtggcgcaaaccacgctgatttaaaatcgaaccagccgagggtattcatgcgcaggccgcgcatactgcgttgcccctgaatgatcagccagtggtgcaataatggcaccatcgctttgctggcgaccagttgctggcaccagttcgccagattcatctcgccattgcgccagcgagcagcgtcggcttgccagtcaatgggaatgcaatgttgtagcagtggcacttcgcataaatgtgcgaaaacagagaagtccagcggcagggtaaagttggcgctgtttagccagatatcactttcgatctctcctgtatgccactgatcgtagtcgatctctttgattttcagcgtgacctggtgacttgccagaatctgctgcatgatcccggcaatcacccgatgctcactgtgatcctgataaaaggttagggtgaggctttccaggccagccggtttttcgctctttatggtgcgggcatggtgccaacgggggagcagtccataagccgggaaccacagttgctggtactgttcctcagcgaaatagaccagattagttggagaaagcacatagcttacccagtccctgacttgctgattcgccccgcgatgggtgcggctgtcgaacagtaaatagtagcaaccttcctccaggcggctttcaatctctttttcctcgccctgtggaccttttagcatcagccctccggctggctcgtcggcaatttccggcagaacccagacgttaacttcgtcgattaatgcccggtaaccgaagaagtcatcgaatgcctgaattttcagttgattggtgctgttgcgaatcaccgcatacggaccggtgccgatgggatggctggcaaagttactgagggtttcccattcgcgcggcaggatcatcgccggaacttgccccagcagtaacggtaaccagcggtccggttgcgtgagatggatatccagcgtccagggcgtcggcgacacaatgtcagcaatatgcgaatagagcggcagcgtattgattcgttttaaagaggcgatcacatcgtccatttccagttcacgaccatggtgaaaatggactcctggacgcaaaaagaaacgccagtgaagcggtgaaatttgctgccagtggtgggcgatgtctgcttccagttccccattttcctcatttatgcgcgttagcgaactgaagatttgccgggcgatatgggtttcggaacggcgcaatgcgctgccaggtagcagattacgcaacggacgatagtagagcacgcgcaggatgtgccgcccctggcggaagctgcggcccagatgagaaaccagcatttgccgcacagtcgctttgtcgccaaccaactgcaccagttgatcgatacgatcctgctccagcaggtcttccgcccgctgttgctgaagcgccagcccggtatagaggaatgtcagacgcgagcgtttaccgcgcccgacttccgcttcccacgtcagccagccgcgatcctgcatggtgttgagcagggtgcgcatatgacgacgcgagcagctcaataacgctgccagttcgttgagcgttgtgtcctgcgatttaccctcgcagcattgccacaggcggatgaactgttgttgcagacgagcagatggcataaaaggggaactcctgtgcaaaagacagcaattttattttccctatattaagtcaataattcctaacgatgaagcaagggggtgccccatgcgtcagttttatcagcactattttaccgcgacagcgaagttgtgctggttgcgttggttaagcgtcccacaacgattaaccatgcttgaaggactgatgcagtgggatgaccgcaattctgaaagttgacttgcctgcatcatgtgtgactgagtattggtgtaaaatcacccgccagcagattatacctgctggttttttttattctcgccgcgctaaaaagggaacgtatgatctggataatgacgatggctcgccgtatgaacggtgtttacgcggcatttatgctggtcgcttttatgatgggggtggccggggcgctacaggctcctacattgagcttatttctgagtcgtgaggttggcgcgcaacctttctggatcggcctcttttatacggtgaatgctattgctgggatcggcgtaagcctctggttggcaaaacgttctgacagtcagggcgatcggcgaaaactgattatattttgctgtttgatggctatcggcaatgcgctattgtttgcatttaatcgtcattatctgacgcttatcacctgtggtgtgcttctggcatctctggccaatacggcaatgccacagttatttgctctggcgcgggaatatgcggataactcggcgcgagaagtggtgatgtttagctcggtgatgcgtgcgcagctttctctggcatgggttatcggtccaccgttggcctttatgctggcgttgaattacggctttacggtgatgttttcgattgccgccgggatattcacactcagtctggtattgattgcatttatgcttccgtctgtggcgcgggtagaactgccgtcggaaaatgctttatcaatgcaaggtggctggcaggatagtaacgtacggatgttatttgtcgcctcgacgttaatgtggacctgcaacaccatgtacattattgatatgccgttgtggatcagtagcgagttaggattgccagacaaactggcgggtttcctgatggggacggcagctggactggaaataccagcaatgattctggctggctactatgtcaaacgttatggtaagcggcgaatgatggtcatagcagtggcggcaggagtactgttttacaccggattgattttctttaatagccgtatggcgttgatgacgctgcaactttttaacgctgtatttatcggcattgttgcgggtattgggatgctatggtttcaggatttaatgcctggaagagcgggggcagctaccaccttatttactaacagtatttctaccggggtaattctggctggcgttattcagggagcaattgcacaaagttgggggcactttgctgtctactgggtaattgcggttatttctgttgtcgcattatttttaaccgcaaaggttaaagacgtttgatgacgtggacgatagcggaaagcccggtcatttgaccgggcaaggggattaattcataaacgcaggttgttttgcttcataagcggcaatggcgtcgtcgtgctgcaaggtaagcccaatactgtccagaccgttcatcatgcagtggcggcggaaggcatcgatggtaaagcgataggttttctctcccgctttcacctcttgcgcttccagatccacgtcgaaatggatccccggattagctttcaccagcgcaaacagttcgtccacttctgcatcgcttaatttcaccggcagcagctggttgttaaagctattgccgtagaagatgtcagcaaaactcggcgcaatcaccactttaaaaccgtagtcggtcaatgcccagggcgcgtgctcacgcgaagagccacagccgaagttttctcgtgccagcaaaatggaagcgccctgatactgcgggaagttcagcacgaagtccgggtttggctgttggcctttttcatccagaaaacgccagtcgttaaacagatgcgcgccaaaacccgtacgggtcactttctgcaaaaactgtttcgggatgattgcatcggtatcgacattggcggcatccagcggaaccaccaggcctgtgtgtttgataaatttctctgccatggtgtgctccttatttaatgttgcgaatgtcggcgaaatgtccggtcacagcagcagcggcagccattgccgggctgaccagatgcgtgcgcccgccgcgcccctggcggccttcaaagttacggttgctggtggaggcacaacgttcgcccggattcagacggtcgttgttcatcgccagacacattgagcagccaggcaagcgccattcaaaaccggcttcaataaagattttatccagaccttccgcttccgcctgggcttttaccgggccagagccgggaaccaccagtgcctgcacgcctggcgcgacttttcgccctttggcgatctccgctgccgcgcgtaaatcttcaatgcgcgagttggtacaggaaccgataaacactttgtcgatagccacttcggtcagcggaatacccggtttcagccccatataggccagcgctttttctgccgacgcgcgttcaaccggatcggcaaacgaagccggatcgggaatattgtcgttcacggaaatcacctggccgggattggtgccccaggtgacctgcggtgaaatttcttctgcttgcagagtgacaacggtatcgaaagttgcgccttcgtcggtttgcagggttttccagtaggcaacggcgtcgtcgaaatctttgcctttcggcgcatgcagacggcctttgacatagttaaaggtggtttcgtccggtgcaaccagaccggcttttgcgcccatttcgattgccatattgcacagggtcatacgaccttccatgcttaaatcacggattgcttcgccgcaaaactccaccacatgcccggtgccgcctgcgctaccggttttaccgataattgccagcacgatatcttttgcggtaatgcccggcgcggctttgccctggacttcaattttcatggtttttgcgcggccctgtttcagggtttgcgttgccagtacgtgttcaacttcggaagtgccgataccaaaggccagtgcgccaaacgcgccgtgggtggcggtatgcgagtcgccgcagacaatggtcatccccggcaaggtgacgccctgttccggccccattacgtggacgatcccctgatacgggtgattcaggtcatacagttcgacgccaaattctttgcagtttttgatcagttcctgcatctggatacgcgccatttcaccgcaggcattaatgtctttggtctgggtagagacgttgtgatccatggtagcgaaggttttgcccggctgacgtaccgggcgaccgtgggcgcgcagaccatcgaacgcctgcggtgaggtcacttcatgcaccaggtggcggtcgatatataacagtggggtttcgttttcggcttcgtacacaacgtgagcgtcgaacaatttttcgtataacgtcttagccatgattacaccccttctgctacatagcgggcaatgatatcgcccatttcatcggtactaacggcggcagcgccacgggctaaatccccggtgcgaatgccttcttctaatgcgcggttaatggcgcgttcaatggcgcaagccgcatcatcggcatccaggctgtaacgcagcagcagtgccagcgaaaggatttgtgcaatcgggttggcgatgtttttgcctgcgatatctggtgccgagccgcccgccggttcatacagtccaaaaccttgctcgttcaggctggcggaaggcaacatccccatcgagccagtgatcattgcgcactcgtcagacagaatgtcgccaaacaggttggagcacagcagaacgtcaaactgtgatggatctttaatcagctgcatggtggcgttgtcgatgtacatatgcgccagttcgacatccgggtattccgtggcgatctcgttaacgatctcccgccataaaatagaggattgcagcacgttggctttatcgatcgacgtcactttgtggcgacgcttgcgagcagattcaaacgcgatgcgggcgatacgttcgatctcaaaacggtgatacacctcggtatcaaaggctttttcatattgtccgctaccttcgcggccttttggctgaccgaaatagatgccgccggtcagttcgcgcacacacaggatgtcgaagccgtttgcggcaatgtctgcacgcagcggacagaatgcttccagcccctgatacagttttgccgggcgcaggttgctgaataatttgaagtgcttacgcagaggcagcagcgcgccgcgttctggttgctggtctggtggtaaatgttcccacttcgggccgcctaccgagccaaacagcacggcatcggcttgctcacaaccttcaaccgtcgcaggcggcagtggttgcccgtggttatcaatggctgcgccgcctacatcgtaatggctggtggtgatgcgcatcgcaaagcggttgcgcacggcatccagcactttcagcgcctgggtcatcacttccggaccaataccgtcccccggcaatacggcaatatggtaattcttcgacatcacacggtttccttgttgttttcgttgtgttgagctttgcgttgcaactctttttcgacttctgcggcacgccagatattgttcagaacgtgcaccatggctttggcagatgactcgacaatatcggtagccaggccgacgccgtggaagcggcgaccgttgtagttagcgacgatatccacctgacccagcgcatctttaccgtggcctttggcggtcaggctgtatttcaccagttcgacgttatattcagtgatgcggttaattgcctgatagacggcatcgaccggaccgttaccgttggcggcttctgctttgacttcttcgccacaggccagtttgacggcggcggtggcgatatcgttagagccagactgcacgctgaagtaatccagacggaaatgctccggctcttcttgctgcttaccgatgaaggccagcgcctccagatcgtaatcaaacacctgaccttttttgtccgccagcttcaggaaagcatcgtacaaattgtctaaattatattcactttctttataccccatctcatccatgcgatgtttcaccgccgcacgccccgaacgagaggtcagattcagctggatttggttcagaccaatagattctggtgtcatgatttcgtagttttcgcggtttttcagcacgccatcctggtgtataccggaggagtgtgcgaatgcgccgctgccaacaatggctttgtttgccgggatcggcatattacaaatctggctaactaactggctggtgcgccatatctcctggtgattaatggcggtgtggacgttgagaatatccttacgaactttgatcgccatgatgacttcttccagggaacagtttccggcacgctcgccgatcccgttcattgcgccttccacctggcgtgcaccggcatgtaccgccgccagtgagtttccgaccgccaggcccaaatcgtcgtgggtatgtacggagataatggctttgtcgatgttaggcacgcgttcatacaggccgctgatgattccggcgaactcaaacggcatggtgtagcccacggtgtccggaatgttgatggtggtggcaccggcattaatcgccgcttcgaccactcgcgccagatcggcaatgggtgtacgcccggcatcttcgcaagaaaattcaacatcatcggtgtaattacgggcgcgtttcaccatatagatagcgcgttcgatcacctcgtccagcgtgctgcgcagcttggtggcgatgtgcattggcgaagtggcaataaaggtatgaatacggaaggcttcggcgactttcagggattcggccgccacgtcgatatctttttccacgcagcgagctaacgcacatacgcggctgtttttaacctggcgggcgatggtttgcaccgattcaaaatcgcccggcgaagagacggggaaaccgacttccatcacgtcaacacccatacgctcaagggccagcgcaatttgcagtttttctttcacactcaagcttgcctgtaacgcctgttcaccgtcgcgcaatgtggtatcgaaaataatgacttgctggctcatggtttgggtccttgtctcttttagagcgcctcgcttcgggcataaaaaaacccgcgcaatggcgcgggttttttgtttgactgcgtgctggcttaatgctggatgccgctcactcgtctaccgcgcaaagaagatgcgtttagtagtagtagaccgataaagcgaacgatgtgagtcattaaatcagctccagatgaatgcgatatgcttttagagttactggatacaaaaacggatgtcaaccctgacgcaataaaaacgtcccgccagcgtgagttctgcatccgtaaaattagctaattgtgctgcggtggttaaagtaagcgatattaatttctgcttaactaccgacgcttttcatcggttgacatatttcagcataaatttttgcatctaatcaacgaggaaaaaggggacaaaatgcacgcgttgcaaaacctatcctgatgatttgtattgaattatatgttttgcgattttttttgatattgatttggtgaatattattgatcaattaatgttaagaattaatgcattaaatatataaattaattattaaataagcacatttaatccattttgtagatgattgagtattcgcggtagttatgattagattgttttcgcaacaaaaacattatggattattatgctgtggtaaatgactcattccacggcaatggattctgtttttatcagaacccgtatctttatgttttccgaattttactcattttgctttttcttattttatatgcatgataaatcatattcttcaggattatttctctgcattccaataagggaaagggagttaagtgtgacagtggagttaagtatgccagaggtacaaacagatcatccagagacggcggagttaagcaaaccacagctacgcatggtcgatctcaacttattaaccgttttcgatgccgtgatgcaggagcaaaacattactcgtgccgctcatgttctgggaatgtcgcaacctgcggtcagtaacgctgttgcacgcctgaaggtgatgtttaatgacgagctttttgttcgttatggccgtggtattcaaccgactgctcgcgcatttcaactttttggttcagttcgtcaggcattgcaactagtacaaaatgaattgcctggttcaggttttgaacccgcgagcagtgaacgtgtatttcatctttgtgtttgcagcccgttagacagcattctgacctcgcagatttataatcacattgagcagattgcgccaaatatacatgttatgttcaagtcttcattaaatcagaacactgaacatcagctgcgttatcaggaaacggagtttgtgattagttatgaagacttccatcgtcctgaatttaccagcgtaccattatttaaagatgaaatggtgctggtagccagcaaaaatcatccaacaattaagggcccgttactgaaacatgatgtttataacgaacaacatgcggcggtttcgctcgatcgtttcgcgtcatttagtcaaccttggtatgacacggtagataagcaagccagtatcgcgtatcagggcatggcaatgatgagcgtacttagcgtggtgtcgcaaacgcatttggtcgctattgcgccgcgttggctggctgaagagttcgctgaatccttagaattacaggtattaccgctgccgttaaaacaaaacagcagaacctgttatctctcctggcatgaagctgccgggcgcgataaaggccatcagtggatggaagagcaattagtctcaatttgcaaacgctaactgattgcagaataggtcagacatgaatgtctggtttattctgcattttttattgaatgtagaattttattctgaatgtgtgggctctctattttaggattaattaaaaaaatagagaaattgctgtaagttgtgggattcagccgatttattatcaatttaatcctctgtaatggaggattttatcgtttcttttcacctttcctcctgtttattcttattaccccgtgtttatgtctctggctgccaattgcttaagcaagatcggacggttaatgtgttttacacattttttccgtcaaacagtgaggcaggccatggagatgttgtctggagccgagatggtcgtccgatcgcttatcgatcagggcgttaaacaagtattcggttatcccggaggcgcagtccttgatatttatgatgcattgcataccgtgggtggtattgatcatgtattagttcgtcatgagcaggcggcggtgcatatggccgatggcctggcgcgcgcgaccggggaagtcggcgtcgtgctggtaacgtcgggtccaggggcgaccaatgcgattactggcatcgccaccgcttatatggattccattccattagttgtcctttccgggcaggtagcgacctcgttgataggttacgatgcctttcaggagtgcgacatggtggggatttcgcgaccggtggttaaacacagttttctggttaagcaaacggaagacattccgcaggtgctgaaaaaggctttctggctggcggcaagtggtcgcccaggaccagtagtcgttgatttaccgaaagatattcttaatccggcgaacaaattaccctatgtctggccggagtcggtcagtatgcgttcttacaatcccactactaccggacataaagggcaaattaagcgtgctctgcaaacgctggtagcggcaaaaaaaccggttgtctacgtaggcggtggggcaatcacggcgggctgccatcagcagttgaaagaaacggtggaggcgttgaatctgcccgttgtttgctcattgatggggctgggggcgtttccggcaacgcatcgtcaggcactgggcatgctgggaatgcacggtacctacgaagccaatatgacgatgcataacgcggatgtgattttcgccgtcggggtacgatttgatgaccgaacgacgaacaatctggcaaagtactgcccaaatgccactgttctgcatatcgatattgatcctacttccatttctaaaaccgtgactgcggatatcccgattgtgggggatgctcgccaggtcctcgaacaaatgcttgaactcttgtcgcaagaatccgcccatcaaccactggatgagatccgcgactggtggcagcaaattgaacagtggcgcgctcgtcagtgcctgaaatatgacactcacagtgaaaagattaaaccgcaggcggtgatcgagactctttggcggttgacgaagggagacgcttacgtgacgtccgatgtcgggcagcaccagatgtttgctgcactttattatccattcgacaaaccgcgtcgctggatcaattccggtggcctcggcacgatgggttttggtttacctgcggcactgggcgtcaaaatggcgttgccagaagaaaccgtggtttgcgtcactggcgacggcagtattcagatgaacatccaggaactgtctaccgcgttgcaatacgagttgcccgtactggtggtgaatctcaataaccgctatctggggatggtgaagcagtggcaggacatgatctattccggccgtcattcacaatcttatatgcaatcgctacccgatttcgtccgtctggcggaagcctatgggcatgtcgggatccagatttctcatccgcatgagctggaaagcaaacttagcgaggcgctggaacaggtgcgcaataatcgcctggtgtttgttgatgttaccgtcgatggcagcgagcacgtctacccgatgcagattcgcgggggcggaatggatgaaatgtggttaagcaaaacggagagaacctgattatgcgccggatattatcagtcttactcgaaaatgaatcaggcgcgttatcccgcgtgattggccttttttcccagcgtggctacaacattgaaagcctgaccgttgcgccaaccgacgatccgacattatcgcgtatgaccatccagaccgtgggcgatgaaaaagtacttgagcagatcgaaaagcaattacacaaactggtcgatgtcttgcgcgtgagtgagttggggcagggcgcgcatgttgagcgggaaatcatgctggtgaaaattcaggccagcggttacgggcgtgacgaagtgaaacgtaatacggaaatattccgtgggcaaattatcgatgtcacaccctcgctttataccgttcaattagcaggcaccagcggtaagcttgatgcatttttagcatcgattcgcgatgtggcgaaaattgtggaggttgctcgctctggtgtggtcggactttcgcgcggcgataaaataatgcgttgagaatgatctcaatgcgcaatttacagcccaacatgtcacgttgggctttttttgcgaaatcagtgggaacctggaataaaagcagttgccgcagttaattttctgcgcttagatgttaatgaatttaacccataccagtacaatggctatggtttttacattttacgcaaggggcaattgtgaaactggatgaaatcgctcggctggcgggagtgtcgcggaccactgcaagctatgttattaacggcaaagcgaagcaataccgtgtgagcgacaaaaccgttgaaaaagtcatggctgtggtgcgtgagcacaattaccacccgaacgccgtggcagctgggcttcgtgctggacgcacacgttctattggtcttgtgatccccgatctggagaacaccagctatacccgcatcgctaactatcttgaacgccaggcgcggcaacggggttatcaactgctgattgcctgctcagaagatcagccagacaacgaaatgcggtgcattgagcaccttttacagcgtcaggttgatgccattattgtttcgacgtcgttgcctcctgagcatcctttttatcaacgctgggctaacgacccgttcccgattgtcgcgctggaccgcgccctcgatcgtgaacacttcaccagcgtggttggtgccgatcaggatgatgccgaaatgctggcggaagagttacgtaagtttcccgccgagacggtgctttatcttggtgcgctaccggagctttctgtcagcttcctgcgtgaacaaggtttccgtactgcctggaaagatgatccgcgcgaagtgcatttcctgtatgccaacagctatgagcgggaggcggctgcccagttattcgaaaaatggctggaaacgcatccgatgccgcaggcgctgttcacaacgtcgtttgcgttgttgcaaggagtgatggatgtcacgctgcgtcgcgacggcaaactgccttctgacctggcaattgccacctttggcgataacgaactgctcgacttcttacagtgtccggtgctggcagtggctcaacgtcaccgcgatgtcgcagagcgtgtgctggagattgtcctggcaagcctggacgaaccgcgtaagccaaaacctggtttaacgcgcattaaacgtaatctctatcgccgcggcgtgctcagccgtagctaagccgcgaacaaaaatacgcgccaggtgaatttccctctggcgcgtagagtacgggactggacatcaatatgcttaaagtaaataagactattcctgactattattgataaatgcttttaaacccgcccgttaattaactcaccagctgaaattcacaataattaagtgatatcgacagcgcgtttttgcattattttgttacatgcggcgatgaattgccgatttaacaaacacttttctttgcttttgcgcaaacccgctggcatcaagcgccacacagacgtaacaaggactgttaaccggggaagatatgtcctaaaatgccgctcgcgtcgcaaactgacactttatatttgctgtggaaaatagtgagtcattttaaaacggtgatgacgatgagggattttttcttacagctattcataacgttaatttgcttcgcacgttggacgtaaaataaacaacgctgatattagccgtaaacatcgggttttttacctcggtatgccttgtgactggcttgacaagcttttcctcagctccgtaaactcctttcagtgggaaattgtggggcaaagtgggaataaggggtgaggctggcatgttccggggagcaacgttagtcaatctcgacagcaaagggcgcttatcagtgcctacccgttatcgggaacagctgcttgagaacgctgccggtcaaatggtttgcaccattgacatttatcacccgtgcctgctgctttaccccctgcctgaatgggaaattatcgagcaaaaattatcgcgtctgtcgagcatgaacccggttgagcgccgtgtgcagcgcctactgttaggtcatgccagcgaatgtcagatggatggcgcaggtcgattgttaatcgcgccagtactgcggcaacatgccgggctgacaaaagaagtgatgctggttggacagttcaacaagtttgagctgtgggatgaaacaacctggcatcaacaggtcaaggaagatatcgacgcagagcagttggctaccggagacttatcggagcgactgcaggacttgtctctataaaatgatggaaaactataaacatactacggtgctgctggatgaagccgttaatggcctcaatatccgtcctgatggcatctacattgatgggacttttggtcgcggtggtcactcacgtctgatcctctcgcagcttggcgaagaggggcgtttgctggcgatcgatcgcgacccgcaggctatcgccgttgcgaagactattgatgatccgcgcttctccatcatccacggacctttctccgcgctgggcgaatacgttgccgagcgcgatcttatcggcaagatcgacggcattctcctcgatcttggcgtctcttcaccgcaacttgatgatgctgaacgtggcttttcctttatgcgcgatggtccgctggacatgcgtatggacccaacccgtgggcagtcagccgctgaatggctacaaaccgcagaagaagccgatatcgcctgggtattgaaaacctatggtgaagagcgttttgccaaacgcattgcccgcgccattgtcgagcgtaaccgcgaacagccgatgacccgcaccaaagaactggcggaagtcgtggctgctgcaacgccggtgaaagataagtttaaacatcccgcgacccgtaccttccaggcggtgcgcatttgggtaaacagtgaactggaggagatagagcaggcgctaaaaagctcgctcaacgtgctggccccgggtgggcggctttcgatcatcagcttccactcgctggaagaccgtattgtgaaacgttttatgcgtgaaaacagccgcggtccgcaagttccggcagggttaccgatgactgaagagcagctcaaaaaactgggtggccgtcagctgcgagcactaggcaagttaatgccgggcgaagaagaggtggctgagaaccctcgtgcccgtagttcagttctgcgtattgcagagaggacgaatgcatgatcagcagagtgacagaagctctaagcaaagttaaaggatcgatgggaagccacgagcgccatgcattgcctggtgttatcggtgacgatcttttgcgatttgggaagctgccactctgcctgttcatttgcattattttgacggcggtgactgtggtaaccacggcgcaccatacccgtttactgaccgctcagcgcgaacaactggtgctggagcgagatgctttagacattgaatggcgcaacctgatccttgaagagaatgcgctcggcgaccatagccgggtggaaaggatcgccacggaaaagctgcaaatgcagcatgttgatccgtcacaagaaaatatcgtagtgcaaaaataaggataaacgcgacgcatgaaagcagcggcgaaaacgcagaaaccaaaacgtcaggaagaacatgccaactttatcagttggcgttttgcgttgttatgcggctgtattctcctggcgctggcttttctgctcggacgcgtagcgtggttacaagttatctccccggatatgctggtgaaagagggcgacatgcgttctcttcgcgttcagcaagtttccacctcccgcggcatgattactgaccgttctggtcgcccgttagcggtgagcgtgccggtaaaagcgatttgggctgacccgaaagaagtgcatgacgctggcggtatcagcgtcggtgaccgctggaaggcgctggctaacgcgctcaatattccgctggatcagctttcagcccgcattaacgccaacccgaaagggcgctttatttatctggcgcgtcaggtgaaccctgacatggcggactacatcaaaaaactgaaactgccggggattcatctgcgtgaagagtctcgccgttactatccgtccggcgaagtgactgctcacctcatcggctttactaacgtcgatagtcaagggattgagggcgttgagaagagtttcgataaatggcttaccgggcagccgggtgagcgcattgtgcgtaaagaccgctatggtcgcgtaattgaagatatttcttctactgacagccaggcagcgcacaacctggcgctgagtattgatgaacgcctgcaggcgctggtttatcgcgaactgaacaacgcggtggcctttaacaaggctgaatctggtagcgccgtgctggtggatgtcaacaccggtgaagtgctggcgatggctaacagcccgtcatacaaccctaacaatctgagcggcacgccgaaagaggcgatgcgtaaccgtaccatcaccgacgtgtttgaaccgggctcaacggttaaaccgatggtggtaatgaccgcgttgcaacgtggcgtggtgcgggaaaactcggtactcaataccattccttatcgaattaacggccacgaaatcaaagacgtggcacgctacagcgaattaaccctgaccggggtattacagaagtcgagtaacgtcggtgtttccaagctggcgttagcgatgccgtcctcagcgttagtagatacttactcacgttttggactgggaaaagcgaccaatttggggttggtcggagaacgcagtggcttatatcctcaaaaacaacggtggtctgacatagagagggccaccttctctttcggctacgggctaatggtaacaccattacagttagcgcgagtctacgcaactatcggcagctacggcatttatcgcccactgtcgattaccaaagttgaccccccggttcccggtgaacgtgtcttcccggaatccattgtccgcactgtggtgcatatgatggaaagcgtggcgctaccaggcggcggcggcgtgaaggcggcgattaaaggctatcgtatcgccattaaaaccggtaccgcgaaaaaggtcgggccggacggtcgctacatcaataaatatattgcttataccgcaggcgttgcgcctgcgagtcagccgcgcttcgcgctggttgttgttatcaacgatccgcaggcgggtaaatactacggcggcgccgtttccgcgccggtctttggtgccatcatgggcggcgtattgcgtaccatgaacatcgagccggatgcgctgacaacgggcgataaaaatgaatttgtgattaatcaaggcgaggggacaggtggcagatcgtaatttgcgcgaccttcttgctccgtgggtgccagacgcaccttcgcgagcactgcgagagatgacactcgacagccgtgtggctgcggcgggcgatctctttgtagctgtagtaggtcatcaggcggacgggcgtcgatatatcccgcaggcgatagcgcaaggtgtggctgccattattgcagaggcgaaagatgaggcgaccgatggtgaaatccgtgaaatgcacggcgtaccggtcatctatctcagccagctcaacgagcgtttatctgcactggcgggccgcttttaccatgaaccctctgacaatttacgtctcgtgggcgtaacgggcaccaacggcaaaaccacgactacccagctgttggcgcagtggagccaactgcttggcgaaatcagcgcggtaatgggcaccgttggtaacggcctgctggggaaagtgatcccgacagaaaatacaaccggttcggcagtcgatgttcagcatgagctggcggggctggtggatcagggcgcgacgttttgcgcaatggaagtttcctcccacgggctggtacagcaccgtgtggcggcattgaaatttgcggcgtcggtctttaccaacttaagccgcgatcaccttgattatcatggtgatatggaacactacgaagccgcgaaatggctgctttattctgagcatcattgcggtcaggcgattattaacgccgacgatgaagtgggccgccgctggctggcaaaactgccggacgcggttgcggtatcaatggaagatcatattaatccgaactgtcacggacgctggttgaaagcgaccgaagtgaactatcacgacagcggtgcgacgattcgctttagctcaagttggggcgatggcgaaattgaaagccatctgatgggcgcttttaacgtcagcaacctgctgctcgcgctggcgacactgttggcactcggctatccactggctgatctgctgaaaaccgccgcgcgtctgcaaccggtttgcggacgtatggaagtgttcactgcgccaggcaaaccgacggtggtggtggattacgcgcatacgccggatgcactggaaaaagccttacaggcggcgcgtctgcactgtgcgggcaagctgtggtgtgtctttggctgtggtggcgatcgcgataaaggtaagcgtccactgatgggcgcaattgccgaagagtttgctgacgtggcggtggtgacggacgataacccgcgtaccgaagaaccgcgtgccatcatcaacgatattctggcgggaatgttagatgccggacatgccaaagtgatggaaggccgtgctgaagcggtgacttgcgccgttatgcaggctaaagagaatgatgtggtactggtcgcgggcaaaggccatgaagattaccagattgttggcaatcagcgtctggactactccgatcgcgtcacggtggcgcgtctgctgggggtgattgcatgattagcgtaacccttagccaacttaccgacattctcaacggtgaactgcaaggtgcagatatcacccttgatgctgtaaccactgatacccgaaaactgacgccgggctgcctgtttgttgccctgaaaggcgaacgttttgatgcccacgattttgccgaccaggcgaaagctggcggcgcaggcgcactactggttagccgtccgctggacatcgacctgccgcagttaatcgtcaaggatacgcgtctggcgtttggtgaactggctgcatgggttcgccagcaagttccggcgcgcgtggttgctctgacggggtcctccggcaaaacctccgttaaagagatgacggcggcgattttaagccagtgcggcaacacgctttatacggcaggcaatctcaacaacgacatcggtgtaccgatgacgctgttgcgcttaacgccggaatacgattacgcagttattgaacttggcgcgaaccatcagggcgaaatagcctggactgtgagtctgactcgcccggaagctgcgctggtcaacaacctggcagcggcgcatctggaaggttttggctcgcttgcgggtgtcgcgaaagcgaaaggtgaaatctttagcggcctgccggaaaacggtatcgccattatgaacgccgacaacaacgactggctgaactggcagagcgtaattggctcacgcaaagtgtggcgtttctcacccaatgccgccaacagcgatttcaccgccaccaatatccatgtgacctcgcacggtacggaatttaccctacaaaccccaaccggtagcgtcgatgttctgctgccgttgccggggcgtcacaatattgcgaatgcgctggcagccgctgcgctctccatgtccgtgggcgcaacgcttgatgctatcaaagcggggctggcaaatctgaaagctgttccaggccgtctgttccccatccaactggcagaaaaccagttgctgctcgacgactcctacaacgccaatgtcggttcaatgactgcagcagtccaggtactggctgaaatgccgggctaccgcgtgctggtggtgggcgatatggcggaactgggcgctgaaagcgaagcctgccatgtacaggtgggcgaggcggcaaaagctgctggtattgaccgcgtgttaagcgtgggtaaacaaagccatgctatcagcaccgccagcggcgttggcgaacattttgctgataaaactgcgttaattacgcgtcttaaattactgattgctgagcaacaggtaattacgattttagttaagggttcacgtagtgccgccatggaagaggtagtacgcgctttacaggagaatgggacatgttagtttggctggccgaacatttggtcaaatattattccggctttaacgtcttttcctatctgacgtttcgcgccatcgtcagcctgctgaccgcgctgttcatctcattgtggatgggcccgcgtatgattgctcatttgcaaaaactttcctttggtcaggtggtgcgtaacgacggtcctgaatcacacttcagcaagcgcggtacgccgaccatgggcgggattatgatcctgacggcgattgtgatctccgtactgctgtgggcttacccgtccaatccgtacgtctggtgcgtgttggtggtgctggtaggttacggtgttattggctttgttgatgattatcgcaaagtggtgcgtaaagacaccaaagggttgatcgctcgttggaagtatttctggatgtcggtcattgcgctgggtgtcgccttcgccctgtaccttgccggcaaagacacgcccgcaacgcagctggtggtcccattctttaaagatgtgatgccgcagctggggctgttctacattctgctggcttacttcgtcattgtgggtactggcaacgcggtaaacctgaccgatggtctcgacggcctggcaattatgccgaccgtatttgtcgccggtggttttgcgctggtggcgtgggcgaccggcaatatgaactttgccagctacttgcatataccgtatctgcgacacgccggggaactggttattgtctgtaccgcgatagtcggggcaggactgggcttcctgtggtttaacacctatccggcgcaggtctttatgggcgatgtaggttcgctggcgttaggtggtgcgttaggcattatcgccgtactgctacgtcaggaattcctgctggtgattatggggggcgtgttcgtggtagaaacgctttctgtcatcctgcaggtcggctcctttaaactgcgcggacaacgtattttccgcatggcaccgattcatcaccactatgaactgaaaggctggccggaaccgcgcgtcattgtgcgtttctggattatttcgctgatgctggttctgattggtctggcaacgctgaaggtacgttaatcatggctgattatcagggtaaaaatgtcgtcattatcggcctgggcctcaccgggctttcctgcgtggactttttcctcgctcgcggtgtgacgccgcgcgttatggatacgcgtatgacaccgcctggcctggataaattacccgaagccgtagaacgccacacgggcagtctgaatgatgaatggctgatggcggcagatctgattgtcgccagtcccggtattgcactggcgcatccatccttaagcgctgccgctgatgccggaatcgaaatcgttggcgatatcgagctgttctgtcgcgaagcacaagcaccgattgtggcgattaccggttctaacggcaaaagcacggtcaccacgctagtgggtgaaatggcgaaagcggcgggggttaacgttggtgtgggtggcaatattggcctgcctgcgttgatgctactggatgatgagtgtgaactgtacgtgctggaactgtcgagcttccagctggaaaccacctccagcttacaggcggtagcagcgaccattctgaacgtgactgaagatcatatggatcgctatccgtttggtttacaacagtatcgtgcagcaaaactgcgcatttacgaaaacgcgaaagtttgcgtggttaatgctgatgatgccttaacaatgccgattcgcggtgcggatgaacgctgcgtcagctttggcgtcaacatgggtgactatcacctgaatcatcagcagggcgaaacctggctgcgggttaaaggcgagaaagtgctgaatgtgaaagagatgaaactttccgggcagcataactacaccaatgcgctggcggcgctggcgctggcagatgctgcagggttaccgcgtgccagcagcctgaaagcgttaaccacattcactggtctgccgcatcgctttgaagttgtgctggagcataacggcgtacgttggattaacgattcgaaagcgaccaacgtcggcagtacggaagcggcgctgaatggcctgcacgtagacggcacactgcatttgttgctgggtggcgatggtaaatcggcggactttagcccactggcgcgttacctgaatggcgataacgtacgtctgtattgtttcggtcgtgacggcgcgcagctggcggcgctacgcccggaagtggcagaacaaaccgaaactatggaacaggcgatgcgcttgctggctccgcgtgttcagccgggcgatatggttctgctctccccagcctgtgccagccttgatcagttcaagaactttgaacaacgaggcaatgagtttgcccgtctggcgaaggagttaggttgatgcgtttatctctccctcgcctgaaaatgccgcgcctgccaggattcagtatcctggtctggatctccacggcgctaaagggctgggtgatgggctcgcgggaaaaagataccgacagcctgatcatgtacgatcgcaccttactgtggctgaccttcggcctcgcggcgattggctttatcatggtgacctcggcgtcaatgcccatagggcaacgcttaaccaacgatccgttcttcttcgcgaagcgtgatggtgtctatctgattttggcgtttattctggcgatcattacgctgcgtctgccgatggagttctggcaacgctacagtgccacgatgctgctcggatctatcatcctgctgatgatcgtcctggtagtgggtagctcggttaaaggggcatcgcgttggatcgatctcggtttgctgcgtatccagcctgcggagctgacaaaactgtcgctgttttgctatatcgccaactatctggtgcgtaaaggcgacgaagtacgtaataacctgcgcggcttcctgaaaccgatgggcgtgattctggtgttggcagtgttactgctggcacagccagaccttggtacggtggtggtgttgtttgtgactacgctggcgatgttgttcctggcgggagcgaaattgtggcagttcattgccattatcggtatgggcatttcagcggttgtgttgctgatactcgccgaaccgtaccgtatccgccgtgttaccgcattctggaacccgtgggaagatccctttggcagcggctatcagttaacgcaatcgctgatggcgtttggtcgcggcgaactttgggggcaaggtttaggtaactcggtacaaaaactggagtatctgccggaagcgcacactgactttattttcgccattatcggcgaagaactggggtatgtcggtgtggtgctggcacttttaatggtattcttcgtcgcttttcgcgcgatgtcgattggccgtaaagcattagaaattgaccaccgtttttccggttttctcgcctgttctattggcatctggtttagcttccaggcgctggttaacgtaggcgcggcggcggggatgttaccgaccaaaggtctgacattgccgctgatcagttacggtggttcgagcttactgattatgtcgacagccatcatgatgctgttgcgtattgattatgaaacgcgtctggagaaagcgcaggcgtttgtacgaggttcacgatgagtggtcaaggaaagcgattaatggtgatggcaggcggaaccggtggacatgtattcccgggactggcggttgcgcaccatctaatggctcagggttggcaagttcgctggctggggactgccgaccgtatggaagcggacttagtgccaaaacatggcatcgaaattgatttcattcgtatctctggtctgcgtggaaaaggtataaaagcactgatagctgccccgctgcgtatcttcaacgcctggcgtcaggcgcgggcgattatgaaagcgtacaaacctgacgtggtgctcggtatgggaggctacgtgtcaggtccaggtggtctggccgcgtggtcgttaggcattccggttgtacttcatgaacaaaacggtattgcgggcttaaccaataaatggctggcgaagattgccaccaaagtgatgcaggcgtttccaggtgctttccctaatgcggaagtagtgggtaacccggtgcgtaccgatgtgttggcgctgccgttgccgcagcaacgtttggctggacgtgaaggtccggttcgtgtgctggtagtgggtggttctcagggcgcacgcattcttaaccagacaatgccgcaggttgctgcgaaactgggtgattcagtcactatctggcatcagagcggcaaaggttcgcaacaatccgttgaacaggcgtatgccgaagcggggcaaccgcagcataaagtgacggaatttattgatgatatggcggcggcgtatgcgtgggcggatgtcgtcgtttgccgctccggtgcgttaacggtgagtgaaatcgccgcggcaggactaccggcgttgtttgtgccgtttcaacataaagaccgccagcaatactggaatgcgctaccgctggaaaaagcgggcgcagccaaaattatcgagcagccacagcttagcgtggatgctgtcgccaacaccctggccgggtggtcgcgagaaaccttattaaccatggcagaacgcgcccgcgctgcatccattccggatgccaccgagcgagtggcaaatgaagtgagccgggttgcccgggcgtaattgtagcgatgccttttgcatcgtatgaatttaagaagttaatggcgtaaagaatgaatacacaacaattggcaaaactgcgttccatcgtgcccgaaatgcgtcgcgttcggcacatacattttgtcggcattggtggtgccggtatgggcggtattgccgaagttctggccaatgaaggttatcagatcagtggttccgatttagcgccaaatccggtcacgcagcagttaatgaatctgggtgcgacgatttatttcaaccatcgcccggaaaacgtacgtgatgccagcgtggtcgttgtttccagcgcgatttctgccgataacccggaaattgtcgccgctcatgaagcgcgtattccggtgatccgtcgtgccgaaatgctggctgagttaatgcgttttcgtcatggcatcgccattgccggaacgcacggcaaaacgacaaccaccgcgatggtttccagcatctacgcagaagcggggctcgacccaaccttcgttaacggcgggctggtaaaagcggcgggggttcatgcgcgtttggggcatggtcggtacctgattgccgaagcagatgagagtgatgcatcgttcctgcatctgcaaccgatggtggcgattgtcaccaatatcgaagccgaccacatggatacctaccagggcgactttgagaatttaaaacagacttttattaattttctgcacaacctgccgttttacggtcgtgcggtgatgtgtgttgatgatccggtgatccgcgaattgttaccgcgagtggggcgtcagaccacgacttacggcttcagcgaagatgccgacgtgcgtgtagaagattatcagcagattggcccgcaggggcactttacgctgctgcgccaggacaaagagccgatgcgcgtcaccctgaatgcgccaggtcgtcataacgcgctgaacgccgcagctgcggttgcggttgctacggaagagggcattgacgacgaggctattttgcgggcgcttgaaagcttccaggggactggtcgccgttttgatttcctcggtgaattcccgctggagccagtgaatggtaaaagcggtacggcaatgctggtcgatgactacggccaccacccgacggaagtggacgccaccattaaagcggcgcgcgcaggctggccggataaaaacctggtaatgctgtttcagccgcaccgttttacccgtacgcgcgacctgtatgatgatttcgccaatgtgctgacgcaggttgataccctgttgatgctggaagtgtatccggctggcgaagcgccaattccgggagcggacagccgttcgctgtgtcgcacaattcgtggacgtgggaaaattgatcccattctggtgccggatccggcgcgggtagccgagatgctggcaccggtattaaccggtaacgacctgattctcgttcagggggctggtaatattggaaaaattgcccgttctttagctgaaatcaaactgaagccgcaaactccggaggaagaacaacatgactgataaaatcgcggtcctgttgggtgggacctccgctgagcgggaagtttctctgaattctggcgcagcggtgttagccggactgcgtgaaggcggtattgacgcgtatcctgtcgacccgaaagaagtcgacgtgacgcaactgaagtcgatgggctttcagaaagtgtttatcgcgctacacggtcgcggcggtgaagatggtacgctgcaggggatgctcgagctgatgggcttgccttataccggaagcggagtgatggcatctgcgctttcaatggataaactacgcagcaaacttctatggcaaggtgccggtttaccggtcgcgccgtgggtagcgttaacccgcgcagagtttgaaaaaggcctgagcgataagcagttagcagaaatttctgctctgggtttgccggttatcgttaagccgagccgcgaaggttccagtgtgggaatgtcaaaagtagtagcagaaaatgctctacaagatgcattaagattggcatttcagcacgatgaagaagtattgattgaaaaatggctaagtgggccggagttcacggttgcgatactcggtgaagaaattttaccgtcaatacgtattcaaccgtccggaaccttctatgattatgaggcgaagtatctctctgatgagacacagtatttctgccccgcaggtctggaagcgtcacaagaggccaatttgcaggcattagtgctgaaagcatggacgacgttaggttgcaaaggatggggacgtattgacgttatgctggacagcgatggacagttttatctgctggaagccaatacctcaccgggtatgaccagccacagcctggtgccgatggcggcacgtcaggcaggtatgagcttctcgcagttggtagtacgaattctggaactggcggactaatatgtcgcaggctgctctgaacacgcgaaacagcgaagaagaggtttcttctcgccgcaataatggaacgcgtctggcggggatccttttcctgctgaccgttttaacgacagtgttggtgagcggctgggtcgtgttgggctggatggaagatgcgcaacgcctgccgctctcaaagctggtgttgaccggtgaacgccattacacacgtaatgacgatatccggcagtcgatcctggcattgggtgagccgggtacctttatgacccaggatgtcaacatcatccagacgcaaatagaacaacgcctgccgtggattaagcaggtgagcgtcagaaagcagtggcctgatgaattgaagattcatctggttgaatatgtgccgattgcgcggtggaatgatcaacatatggtagacgcggaaggaaataccttcagcgtgccgccagaacgcaccagcaagcaggtgcttccaatgctgtatggcccggaaggcagcgccaatgaagtgttgcagggctatcgcgaaatggggcagatgctggcaaaggacagatttactctgaaggaagcggcgatgaccgcgcggcgttcctggcagttgacgctgaataacgatattaagctcaatcttggccggggcgatacgatgaaacgtttggctcgctttgtagaactttatccggttttacagcagcaggcgcaaaccgatggcaaacggattagctacgttgatttgcgttatgactctggagcggcagtaggctgggcgcccttgccgccagaggaatctactcagcaacaaaatcaggcacaggcagaacaacaatgatcaaggcgacggacagaaaactggtagtaggactggagattggtaccgcgaaggttgccgctttagtaggggaagttctgcccgacggtatggtcaatatcattggcgtgggcagctgcccgtcgcgtggtatggataaaggcggggtgaacgacctcgaatccgtggtcaagtgcgtacaacgcgccattgaccaggcagaattgatggcagattgtcagatctcttcggtatatctggcgctttctggtaagcacatcagctgccagaatgaaattggtatggtgcctatttctgaagaagaagtgacgcaagaagatgtggaaaacgtcgtccataccgcgaaatcggtgcgtgtgcgcgatgagcatcgtgtgctgcatgtgatcccgcaagagtatgcgattgactatcaggaagggatcaagaatccggtaggactttcgggcgtgcggatgcaggcaaaagtgcacctgatcacatgtcacaacgatatggcgaaaaacatcgtcaaagcggttgaacgttgtgggctgaaagttgaccaactgatatttgccggactggcatcaagttattcggtattgacggaagatgaacgtgaactgggtgtctgcgtcgtcgatatcggtggtggtacaatggatatcgccgtttataccggtggggcattgcgccacactaaggtaattccttatgctggcaatgtcgtgaccagtgatatcgcttacgcctttggcacgccgccaagcgacgccgaagcgattaaagttcgccacggttgtgcgctgggttccatcgttggaaaagatgagagcgtggaagtgccgagcgtaggtggtcgtccgccacggagtctgcaacgtcagacactggcagaggtgatcgagccgcgctataccgagctgctcaacctggtcaacgaagagatattgcagttgcaggaaaagcttcgccaacaaggggttaaacatcacctggcggcaggcattgtattaaccggtggcgcagcgcagatcgaaggtcttgcagcctgtgctcagcgcgtgtttcatacgcaagtgcgtatcggcgcgccgctgaacattaccggtttaacggattatgctcaggagccgtattattcgacggcggtgggattgcttcactatgggaaagagtcacatcttaacggtgaagctgaagtagaaaaacgtgttacagcatcagttggctcgtggatcaagcgactcaatagttggctgcgaaaagagttttaatttttatgaggccgacgatgattacggcctcaggcgacaggcacaaatcggagagaaactatgtttgaaccaatggaacttaccaatgacgcggtgattaaagtcatcggcgtcggcggcggcggcggtaatgctgttgaacacatggtgcgcgagcgcattgaaggtgttgaattcttcgcggtaaataccgatgcacaagcgctgcgtaaaacagcggttggacagacgattcaaatcggtagcggtatcaccaaaggactgggcgctggcgctaatccagaagttggccgcaatgcggctgatgaggatcgcgatgcattgcgtgcggcgctggaaggtgcagacatggtctttattgctgcgggtatgggtggtggtaccggtacaggtgcagcaccagtcgtcgctgaagtggcaaaagatttgggtatcctgaccgttgctgtcgtcactaagcctttcaactttgaaggcaagaagcgtatggcattcgcggagcaggggatcactgaactgtccaagcatgtggactctctgatcactatcccgaacgacaaactgctgaaagttctgggccgcggtatctccctgctggatgcgtttggcgcagcgaacgatgtactgaaaggcgctgtgcaaggtatcgctgaactgattactcgtccgggtttgatgaacgtggactttgcagacgtacgcaccgtaatgtctgagatgggctacgcaatgatgggttctggcgtggcgagcggtgaagaccgtgcggaagaagctgctgaaatggctatctcttctccgctgctggaagatatcgacctgtctggcgcgcgcggcgtgctggttaacatcacggcgggcttcgacctgcgtctggatgagttcgaaacggtaggtaacaccatccgtgcatttgcttccgacaacgcgactgtggttatcggtacttctcttgacccggatatgaatgacgagctgcgcgtaaccgttgttgcgacaggtatcggcatggacaaacgtcctgaaatcactctggtgaccaataagcaggttcagcagccagtgatggatcgctaccagcagcatgggatggctccgctgacccaggagcagaagccggttgctaaagtcgtgaatgacaatgcgccgcaaactgcgaaagagccggattatctggatatcccagcattcctgcgtaagcaagctgattaagaattgactggaatttgggtttcgaggctctttgtgctaaactggcccgccgaatgtatagtacacttcggttggataggtaatttggcgagataatacgatgatcaaacaaaggacacttaaacgtatcgttcaggcgacgggtgtcggtttacataccggcaagaaagtcaccctgacgttacgccctgcgccggccaacaccggggtcatctatcgtcgcaccgacttgaatccaccggtagatttcccggccgatgccaaatctgtgcgtgataccatgctctgtacgtgtctggtcaacgagcatgatgtacggatttcaaccgtagagcacctcaatgctgctctcgcgggcttgggcatcgataacattgttatcgaagttaacgcgccggaaatcccgatcatggacggcagcgccgctccgtttgtatacctgctgcttgacgccggtatcgacgagttgaactgcgccaaaaaatttgttcgcatcaaagagactgttcgtgtcgaagatggcgataagtgggctgaatttaagccgtacaatggtttttcgctggatttcaccatcgattttaaccatccggctattgattccagcaaccagcgctatgcgatgaacttctccgctgatgcgtttatgcgccagatcagccgtgcgcgtacgttcggtttcatgcgtgatatcgaatatctgcagtcccgtggtttgtgcctgggcggcagcttcgattgtgccatcgttgttgacgattatcgcgtactgaacgaagacggcctgcgttttgaagacgaatttgtgcgtcacaaaatgctcgatgcgatcggtgacttgttcatgtgtggtcacaatattattggtgcatttaccgcttataaatccggtcatgcactgaataacaaactgctgcaggctgtcctggcgaaacaggaagcctgggaatatgtgaccttccaggacgacgcagaactgccgttggccttcaaagcgccttcagctgtactggcataacgacatttatactgtcgtataaaattcgactggcaaatctggcactctctccggccaggtgaaccagtcgtttttttttgaattttataagagctataaaaaacggtgcgaacgctgttttcttaagcacttttccgcacaacttatcttcattcgtgctgtggactgcaggctttaatgataagatttgtgcgctaaatacgtttgaatatgatcgggatggcaataacgtgagtggaatactgacgcgctggcgacagtttggtaaacgctacttctggccgcatctcttattagggatggttgcggcgagtttaggtttgcctgcgctcagcaacgccgccgaaccaaacgcgcccgcaaaagcgacaacccgcaaccacgagccttcagccaaagttaactttggtcaattggccttgctggaagcgaacacacgccgcccgaattcgaactattccgttgattactggcatcaacatgccattcgcacggtaatccgtcatctttctttcgcaatggcaccgcaaacactgcccgttgctgaagaatctttgcctcttcaggcgcaacatcttgcattactggatacgctcagcgcgctgctgacccaggaaggcacgccgtctgaaaagggttatcgcattgattatgcgcattttaccccacaagcaaaattcagcacgcccgtctggataagccaggcgcaaggcatccgtgctggccctcaacgcctcacctaacaacaataaacctttacttcattttattaactccgcaacgcggggcgtttgagattttattatgctaatcaaattgttaactaaagttttcggtagtcgtaacgatcgcaccctgcgccggatgcgcaaagtggtcaacatcatcaatgccatggaaccggagatggaaaaactctccgacgaagaactgaaagggaaaaccgcagagtttcgtgcacgtctggaaaaaggcgaagtgctggaaaatctgatcccggaagctttcgccgtggtacgtgaggcaagtaagcgcgtctttggtatgcgtcacttcgacgttcagttactcggcggtatggttcttaacgaacgctgcatcgccgaaatgcgtaccggtgaaggaaaaaccctgaccgcaacgctgcctgcttacctgaacgcactaaccggtaaaggcgtgcacgtagttaccgtcaacgactacctggcgcaacgtgacgccgaaaacaaccgtccgctgtttgaattccttggcctgactgtcggtatcaacctgccgggcatgccagcaccggcaaagcgcgaagcttacgcagctgacatcacttacggtacgaacaacgaatacggctttgactacctgcgcgacaacatggcgttcagccctgaagaacgtgtacagcgtaaactgcactatgcgctggtggacgaagtggactccatcctgatcgatgaagcgcgtacaccgctgatcatttccggcccggcagaagacagctcggaaatgtataaacgcgtgaataaaattattccgcacctgatccgtcaggaaaaagaagactccgaaaccttccagggcgaaggccacttctcggtggacgaaaaatctcgccaggtgaacctgaccgaacgtggtctggtgctgattgaagaactgctggtgaaagagggcatcatggatgaaggggagtctctgtactctccggccaacatcatgctgatgcaccacgtaacggcggcgctgcgcgctcatgcgctgtttacccgtgacgtcgactacatcgttaaagatggtgaagttatcatcgttgacgaacacaccggtcgtaccatgcagggccgtcgctggtccgatggtctgcaccaggctgtggaagcgaaagaaggtgtgcagatccagaacgaaaaccaaacgctggcttcgatcaccttccagaactacttccgtctgtatgaaaaactggcggggatgaccggtactgctgataccgaagctttcgaatttagctcaatctacaagctggataccgtcgttgttccgaccaaccgtccaatgattcgtaaagatctgccggacctggtctacatgactgaagcggaaaaaattcaggcgatcattgaagatatcaaagaacgtactgcgaaaggccagccggtgctggtgggtactatctccatcgaaaaatcggagctggtgtcaaacgaactgaccaaagccggtattaagcacaacgtcctgaacgccaaattccacgccaacgaagcggcgattgttgctcaggcaggttatccggctgcggtgactatcgcgaccaatatggcgggtcgtggtacagatattgtgctcggtggtagctggcaggcagaagttgccgcgctggaaaatccgaccgcagagcaaattgaaaaaattaaagccgactggcaggtacgtcacgatgcggtactggaagcaggtggcctgcatatcatcggtaccgagcgtcacgaatcccgtcgtatcgataaccagttgcgcggtcgttctggtcgtcagggggatgctggttcttcccgtttctacctgtcgatggaagatgcgctgatgcgtatttttgcttccgaccgagtatccggcatgatgcgtaaactgggtatgaagccaggcgaagccattgaacacccgtgggtgactaaagcgattgccaacgcccagcgtaaagttgaaagccgtaacttcgacattcgtaagcaactgctggaatatgatgacgtggctaacgatcagcgtcgcgccatttactcccagcgtaacgaactgttggatgtcagcgatgtgagcgaaaccattaacagcattcgtgaagatgtgttcaaagcgaccattgatgcctacattccaccacagtcgctggaagaaatgtgggatattccggggctgcaggaacgtctgaagaacgatttcgacctcgatttgccaattgccgagtggctggataaagaaccagaactgcatgaagagacgctgcgtgagcgcattctggcgcagtccatcgaagtgtatcagcgtaaagaagaagtggttggtgctgagatgatgcgtcacttcgagaaaggcgtcatgctgcaaacgcttgactccctgtggaaagagcacctggcagcgatggactatctgcgtcagggtatccacctgcgtggctacgcacagaaagatccgaagcaggaatacaaacgtgaatcgttctccatgtttgcagcgatgctggagtcgttgaaatatgaagttatcagtacgctgagcaaagttcaggtacgtatgcctgaagaggttgaggagctggaacaacagcgtcgtatggaagccgagcgtttagcgcaaatgcagcagcttagccatcaggatgacgactctgcagccgcagctgcactggcggcgcaaaccggagagcgcaaagtaggacgtaacgatccttgcccgtgcggttctggtaaaaaatacaagcagtgccatggccgcctgcaataaaagctaactgttgaagtaaaaggcgcaggattctgcgccttttttataggtttaagacaatgaaaaagctgcaaattgcggtaggtattattcgcaacgagaacaatgaaatctttataacgcgtcgcgcagcagatgcgcacatggcgaataaactggagtttcccggcggtaaaattgaaatgggtgaaacgccggaacaggcggtggtgcgtgaacttcaggaagaagtcgggattaccccccaacatttttcgctatttgaaaaactggaatatgaattcccggacaggcatataacactgtggttttggctggtcgaacgctgggaaggggagccgtggggtaaagaagggcaacccggtgagtggatgtcgctggtcggtcttaatgccgatgattttccgccagccaatgaaccggtaattgcgaagcttaaacgtctgtaggtcagataaggcgttttcgccgcatccgacattcgcacacgatgcctgatgcgacgctggcgcgtcttatcaggcctaaagggatttctaactcattgataaatttgtttttgtaggtcggataaggcgttcacgccgcatccgacatttgcacaagatgcctgatgcgacgctgtccgcgtcttatcaggcctacgtgcggcatcagacaaatgtcactgctttggttcttcgctccagtcatcgctttcggaaagatcgccactgctggggattcgtttttcttcagcagcccattctccgaggtcgatcagctgacaacgtttggagcaaaatggccgaaacgggctgatttcaccccacaccaccgttttcccgcaggttgggcaattcaccgtaatagtttctgacatttttactccttagcaacaggccagttcgaaatccagacgttccggtacctgtccgttttcagtgtccagcggcataaaacgaatggcaaaacggctcttatgtccggaaatttgcggataaagctgtgaatcgagcgacagattcaggcgcagcaagtcggcatcgccaccgttatcctgataaaaaccattcaggctggtttgtttacggaagggggccgactggcgaattaaatccagcaccatggtaagtgcctgggtgagcgggttcaggctggcaatccaggtttctacctggctgtcgcgctgcgcctggggtagatgcagccaaatgtgcaatgtaggtaaatcaaagctgcaacagccgcctgggatgctcagtcgctgacgcaccagagcaatcaaacgatcttcacgcagaaattgcccgatacgcggcgcggaaattaatacgctccccgccgcttttaactgctgaattaatgcttcaatacggctctggtccacgccaggcacgccaatccaggtctggagtttacgttgctgccggtcaagttctttcaacagctcagtgcggacttcgccgcgctcgaaaacatccagtaattcactgacattacggaagaaatgcagcgcgccagcgtggtcaacgatgggtaaattaacggtgagttgctgaatcaaaaactcaatgcgcagccatgtacgcattttttcatttagtggatgttcaaaaaggacctgggtctgcattacggtttttcctgtgagacaaactgcgacgcaagctgcaaatagtgtgcgtgcaggcgggcaacatccgatgcgatagcatccggtgcgccgttattatcaatgacgtcatctgccacggcaaggcgggcttcgcgcgttgcctgagcagcaaggatttgttcgacatgctcgcgagttacatcatcgcgctgcatggtgcgcttaagttgcgtttctgggctgacatccaccacaagcactcgattcgcttttttatacagtgagttttctaccagcaatggcacaacccacagtacatagggggaagtagcttgctggatctggtgttgcgtctcttgctgaatcagcggatgcagcagggcgttaagccagtttttctcttccgggttggcgaagatccgctcgcgcaaggcccggcgctgcaatgttccatcagcagcaatcatgttagcgccaaagtgatcagcaatggcatgtagcgcaggtgcacctggttcaaccacctgacgcgcaataatatcggcatcaatgacgttaattccgagatcagcaaacgcattggcaacggtactcttgccactgccaatgcctcccgttaaggcaactatatacctcataatttatattcccgggaattcatcatgattatcaaaacgttaaaaatgagtgcacgaaagcgaaattgatgaaacgttcgctcactatttaccaggtaaatttatgggattgtagcgtaaaaaaagacaatttcgcagtcttgcgccgcattgattagtgcgtatgatagcgtcactggagttgcgctcttacccttatagccattaaccccaggaatccgcacatgcgtattgaagaagatctgaagttaggttttaaagacgttctcatccgccctaaacgctccactcttaaaagccgttccgatgttgaactggaacgtcaattcaccttcaaacattcaggtcagagctggtccggcgtgccgattatcgccgcaaatatggacaccgtaggcacattttctatggcctctgcgctggcttcttttgatattttgactgctgtgcataaacactattctgtcgaagagtggcaagcgtttatcaacaattcttccgctgatgtgctgaaacatgtgatggtttctaccggtacgtctgatgcggatttcgaaaaaactaaacagattctcgacctgaacccggcattaaacttcgtttgtattgacgtggcgaatggttattccgaacacttcgtgcagttcgttgcgaaagcgcgtgaagcgtggccgaccaaaaccatttgtgctggtaacgtagtgactggtgaaatgtgtgaggagcttatcctctcaggtgccgatatcgttaaagttggcattggcccaggttctgtttgtacaactcgcgtcaaaacaggcgtcggttatccgcaactttctgcggtaatcgaatgtgccgatgctgcgcacggtctgggcggaatgatcgtcagcgatggtggctgcaccacgccgggcgatgtggcgaaagcctttggcggcggtgccgatttcgtcatgcttggcggcatgctggcgggccacgaagagagcggcggtcgcatcgttgaggagaacggcgagaaatttatgctgttctacggcatgagctccgagtctgcgatgaaacgtcacgttggcggcgttgcggaatatcgcgcagcagaaggtaaaaccgttaagctgccgctgcgaggcccggttgaaaataccgcgcgagatattttgggcggcctgcgttcagcttgtacatacgttggggcttcacgcctgaaagagctgaccaagcgcaccacgtttattcgtgtgcaggaacaagaaaaccgcatcttcaacaacctgtaatctcccaacgctggcgtggagcaacacgccagcgttatcccatcccactcatcgcatcgcctaaatggaaaattggcagatacattgccaccaccagcgtaccaataattcctcccgttatgatcagcaacgccggttccagtaaggctgcgaggttatccgccagcgccattgtgttttcccgatgatgatgggcgaggttgtctaacatgagatccagagagccggatgcctctcctgttctcactaattgcaaacagagcgggctaaactcaccggtattttttagcgccagccagatgggttgaccgttactgatatcgtgctggatttgtgtcagaagttgcacccagtacgggcagcgcattgtttctctgacgctctctacgccctgtaaaaaagtaatgcctgcactttgtgtcagcgccagaatcgtaaagatctgcgtgagtttttgtccccgcatcagtgaacccataatcgggatgcgtaacagcaatttctgccgcactataagccaggtcggtcggcgcatcagcaacttattggctatcgccagcagaaagccgaacaacaccagcagccagctccattcgccactaaagtctgccagcgtcatgatcccctgcgttagtgccggtagtggggtgttgaaggtcttatagatagcggcaaactccggcagaacaaaatgcagcattgccacaaccaccatgattgccatcgctaaaatgatgatgggataacgtaacgctgatttcactttgtcggtcaactgacgctgggctttttgctgacgcgccagttcaaagcagcattcatccagcttaccggtcagttcacccgtgcggatcatcgcctgatagagcggcggaaatacctctgaccagggtaataaggcattggaaaaagcaatgccctgttcgagatcgtgcgccagcgattgcagcaacgcttgccattgcttactgggatgctgttccgccagcagagccagcccttcagaaagcgttaaccctgctttgagtagcgtcgccagttgatgaatgacttccgcgcttttatctcctcgccactgcgcagaattgatggcgattcgcttcaggcttagtggggtaaccatctgttgctgtagtgccataagcagtaaagtacggctctctgcccatagcatcccatcttgcgcattgccgtcgccggttatgccatgccagcgccagagttgcttactcgccatgcggcatccccagtacgcggattaactcttcaaaggtggttaagccttgctctacggccaggcagccgttttcaaaaagcgtacgcatacccgcctgtcgtgcgtgcgtttccagcgattcaacgtcggtattagcggaaataagctgacgaatgaccggcgttatgggcagaacttcaaataaggccgtacgaccataaaaaccgtggtagcaatgtacacaaccgggtgcctgccagtggggcagcggcgatggccatacattgtctggaatgtggatgggctccccttgctgccggcgacaatgtgggcaaagtttgcgtaccagacgctgggctattaccagcgtaagcgccgatgatagcatccagcgggcgacccccatttgctgtaaacgtaccagcgtttcgcaggtggaattagtgtgtagggtagacaacaccaggtgaccagtttgcgccgctttaatagcgatctctgctgtttcgccatcgcggatctctccgatcatgatgacgtcaggatcctggcgcaataacgcacgcaaaacgccctgaaaggtgagtccggcacgcggatggatttgcgtctggtttagtccggctatggggatctcaactggatcttcgacgctacaaatattaatgtcagcggtattcagcttttgcagggcactataaagcgtgaccgttttgccgctgccggtagggccagttaccagcaccagtccctgtggttgttgcaaggcatgagcaaagtccgccagttgtaacggctgcattccaagcgtgttgacatccagtgcctgacccacctgctgtaacaaccttaataccaccttttcaccaccccgacatggtaaggtcgcaatacgaaatgagacggcgtttcctgccagttcgacagtgaattgcccgtcctgcggcaggcgatgttccgcaatatccaggtttcccagcacttttaatctggcggttaatgcgactccggcatccggtgaaacatccggtaaaggatgcaatacgccgtcgatacgcaagcggatgcggtaggcattgtccgctggttcgatatgaatatcagacgcgcgttgttccagcgcagattgtaacgttcgagttagcaactctgctttgggctgatgcttctcctgaacagctacgggcaatgtctgttgtgtgcgactggcgtgaccttccatttgttggcgcgtccagcaggtgatctcaatacgtttggtggtagcgaaatgcaatgcgtccagtagctcatgcgaaggtgcatcgactaccgcaacatgaaccacctcttcgctggcatccagcaagactccatgataacgcagacacagggcagtgagctgtggaatattcattgccgctccttagttggcgtcatcaaagcggaagacatcttcgcaggcttgctgcaatgcgctgtcactttgaatattgcagttgcgcgtccagccggtgacgccgtttgcgttatcccaacccggtgtcatgacgacgcttagcccattgagactttcttgcccggtcagcgacaccacgccctttgccacactcatggctgaaacatagcgggtggtggtaggcgagggaatgccattgctgccaccgtcgcaggtatctaatccaccatgttccagcgcgcacaactctacggcggtacggtaaggcacaaaggtttgtagcatgtcggtgagtgcggctttgcgcaggtagttttgataagcgggaataccaatggcgcttaaaatggcaatgatgccaataaccaccatcagttcgataagtgtaaaaccgcgttgcttgtccatctgtttcgctccttgatttggttggcgctactttggcaaacgccatcagcacaggcgaggggcaaaaaacgaaacgggaaagcagattccgaggttttttatttcgttgcagcgaaagacaagaaatttgcgaggcgttacgaagaaagttggggaaggggagattatccgcccgcgatggagcggataaatctgtcaactattagcgaaaacgcattgaaaggtcgagtgcttgtacgtgtttagttagcgcaccgacggagataaagtccacgcccgtttcggcaaattcacgcagtgttttgtcagtgacgttgccagacacttccagtagcgccttgccgttggtgcgtttgacggcttcgcgcatctgttctgtttcgaagttatccagcatgatgatatcggctcctgctttcagggcttcatcaagttcttccagattctctacttcgacttctactggcgcatccgggtgcagccaggacgctttttcgaccgcctggcgcactgagccggaggcaataatatggttttctttgatcaggaaggcatcagaaagccccagacggtgattcgctccgccgccgcaaagtaccgcgtatttcagagctgaacgcaggccgggtaaggttttgcgcgtatccaacaactgcgtgttggtgccttccagcaattcgacatagtggcgtaccttactggcaactcctgaaagggtttgcacaaaattaagcgcagtgcgttcgcccgttaacagcacgcgggatgggccttcaagttcgaacaaggattgattggcattgatgacatcgccgtcatccacatgccagattatggtgacatcgtcgcctgccagttgaataaacacctcttcaacccagcgtttgccgcaaaagacgccattctcgcgggtgatcaccgtggcatgagagcgagaattttccggtaaaagttttgccgtaatatcattgttggcatcgactgttccgcctaaatcttcccgcagcgcctgggccaccgcgccggggatatcgagattaatgcgttccagcagctcgtcacgtcgggtgtcagggttatagcggcgaggcggcatgttaaaactccagatagctaacgaatcataaggtagaaacatgctactctgaaccgggtattagcaccacatataaggagatcctgcatgttgttagaacaggggtggctggttggcgcgcgccgcgttccctcaccacattacgattgccgcccggatgacgaaacacccaccctgctggtggtgcacaatattagcctgccgccaggcgagtttggcggtccgtggatcgacgcattattcactggaactattgatccgcaggcacatcctttctttgctgagatcgcccatttgcgcgtctccgctcactgtttgattcgccgtgatggtgaaatagtccagtatgttcctttcgataaacgtgcatggcatgcgggagtctctcagtatcaggggcgcgaacgctgcaatgatttttctattgggattgagcttgaaggcaccgatacgctggcgtataccgatgcgcagtatcaacagcttgcggcggttacgcgggcactgattgattgctatccggatatcgctaaaaacatgacgggccattgtgatattgcgccggatcggaaaaccgatcccggtcctgcatttgattgggcacggtttcgtgtgctggtcagcaaggagacaacatgacgctatttacaaccttactggtgttaattttcgagcgcctgtttaagttgggcgagcactggcagcttgatcatcgtcttgaagcgttctttcggcgggtgaaacatttttctctcgggcgcacgttaggcatgaccattattgcgatgggcgtgacttttttactgttacgcgcattgcagggagtattgttcaacgttcccacgctactggtgtggctgctgattggtttgctgtgtattggcgcaggtaaagttcgtcttcattatcatgcttatctgacagctgcttcacgtaatgatagccatgcccgtgccacgatggctggcgaactcaccatgattcacggcgtcccggcaggctgcgacgaacgtgagtatttgcgtgagctgcaaaatgcattgctgtggattaactttcgtttttatcttgcaccgctgttctggctgattgtggggggaacctggggacccgttacgctgatggggtatgcgtttttgcgtgcatggcaatactggctggcgcgatatcagacgccgcatcatcgtttacagtccggcattgatgccgtgcttcatgtactggattgggtgccggttcgtcttgcgggtgtggtatatgccttgatcggtcatggtgagaaagcgttaccggcctggtttgcttcgctgggtgatttccatacttcgcagtatcaggtgttaacgcgtctggcgcagttctctctggcgcgtgaaccgcatgtcgataaggtggagacgccgaaggcagcggtttcaatggcgaagaaaacctcgttcgtggtcgtggtggtgattgcactactgacgatttacggggcgttggtgtaaagattattgccctcaccctgtacgggtgagggcgtagagagattaatgcgcttttacggctttggcggttttctctttaaacagatagccgatacctaacacgatcagccataccgggatcaggtataccgaaatcgccattcctggggtcatcagcataatcaccagtaccgccgccataaacagcaggcagatccagttacccagcggataaagcagagcagggaagcgagttaccacgccttgttcctgcttggcgcgacggaatttcatatgcgccaggctaatcatcgcccagttgattaccagtgcagataccaccagcgccattaacagtccgaaagcggactctggggcaaggtagttaatcagtacgcacaacgccgttaccagtgcagacaccagaatggtatttactggtacaccacgtttatcgacagacgccagcgcttttggcgcattaccctgttgtgccagaccaaacagcatacggctgttgcaatatacgcagctgttgtacacggagagcgccgcagtcagtaccacgatgttcagcgcattcgccacaaaggtatcgcctaactcgtggaagatcagcacaaacggactggtatcggcggtaacgcgggtccacggcatcagtgagagcagaacggctaacgaaccaatatagaaaatcaggatgcggtagataacctggttagttgctttcggtatactttgctccgggttatcagcttctgctgcggtgatccccaccagttccagaccaccgaacgagaacatgataatcgccatcatcatcaccagcccggtgaagccgtgcggcaggaaaccaccctgatcccacaggttgctaacggtcgcctgcgggccgccgttgccactgaatagcagccagccgccgaagatgatcatcgctaccaccgcgataactttgataatggcaaaccagaactccatctcgccaaacactttaacgttggtcaggttgatggcgttaatcaccacaaagaatacggcggcagaaacccaggtggggatttccggataccagaactgaatgtatttacccacggcagtcagctcagccatggcaactaaaacgtacagtacccagtagttccagccagaggcgaaaccggcaaaactgccccagtatttataagcaaagtggctaaaggagcctgcgacaggttcttcgaccaccatttcacccagctgacgcatgatcagaaaggcgataaaaccagcaatggcgtaacccaggataatccctggccctgcggactgtattacggaggcgctacccaggaataacccggtccctatcgcgccacccagcgcgataagctgaatatggcggtttttaaggccgcgctttagctgctcgccgtgctgttgaccttccatcatgaaacctcgtgcggtggttgtttttttgatctacgcagtgatgcgtgtgtaagtttgcaattccgtttgttgtattaatttgtttacatcaaagaagtttgaattgttacaaaaagacttccgtcagatcaagaataatggtatgcggcagcgaatgcacccgctttatgcatggttgaagatgagttgcttaaaaagaaaccgtttgtaaagctcagcctcaacccctctcaatatgtagaatgaatttaaattcgttttaattgaattaaaaatcacaaaattggtaagtgaatcggttcaattcggatttttatagtttaataatcgttaaaaaactcctttcctacgtaaagtctacatttgtgcatagttacaactttgaaacgttatatatgtcaagttgttaaaatgtgcacagtttcatgatttcaatcaaaacctgtatggacataaggtgaatactttgttactttagcgtcacagacatgaaattggtaagaccaattgacttcggcaagtggcttaagacaggaactcatggcctacagcaaaatccgccaaccaaaactctccgatgtgattgagcagcaactggagtttttgatcctcgaaggcactctccgcccgggcgaaaaactcccaccggaacgcgaactggcaaaacagtttgacgtctcccgtccctccttgcgtgaggcgattcaacgtctcgaagcgaagggcttgttgcttcgtcgccagggtggcggcacttttgtccagagcagcctatggcaaagcttcagcgatccgctggtggagctgctctccgaccatcctgagtcacagtatgacttgctcgaaacacgacacgccctggaaggtatcgccgcttattacgccgcgctgcgtagtaccgatgaagacaaggaacgcatccgtgaactccaccacgccatagagctggcgcagcagtctggcgatctggacgcggaatcaaacgccgtactccagtatcagattgccgtcaccgaagcggcccacaatgtggttctgcttcatctgctaaggtgtatggagccgatgttggcccagaatgtccgccagaacttcgaattgctctattcgcgtcgcgagatgctgccgctggtgagtagtcaccgcacccgcatatttgaagcgattatggccggtaagccggaagaagcgcgcgaagcatcgcatcgccatctggcctttatcgaagaaattttgctcgacagaagtcgtgaagagagccgccgtgagcgttctctgcgtcgtctggagcaacgaaagaattagtgatttttctggtaaaaattatccagaagatgttgtaaatcaagcgcatataaaagcgcggcaactaaacgtagaacctgtcttattgagctttccggcgagagttcaatgggacaggttccagaaaactcaacgttattagatagataaggaataacccatgtcagaacgtttcccaaatgacgtggatccgatcgaaactcgcgactggctccaggcgatcgaatcggtcatccgtgaagaaggtgttgagcgtgctcagtatctgatcgaccaactgcttgctgaagcccgcaaaggcggtgtaaacgtagccgcaggcacaggtatcagcaactacatcaacaccatccccgttgaagaacaaccggagtatccgggtaatctggaactggaacgccgtattcgttcagctatccgctggaacgccatcatgacggtgctgcgtgcgtcgaaaaaagacctcgaactgggcggccatatggcgtccttccagtcttccgcaaccatttatgatgtgtgctttaaccacttcttccgtgcacgcaacgagcaggatggcggcgacctggtttacttccagggccacatctccccgggcgtgtacgctcgtgctttcctggaaggtcgtctgactcaggagcagctggataacttccgtcaggaagttcacggcaatggcctctcttcctatccgcacccgaaactgatgccggaattctggcagttcccgaccgtatctatgggtctgggtccgattggtgctatttaccaggctaaattcctgaaatatctggaacaccgtggcctgaaagatacctctaaacaaaccgtttacgcgttcctcggtgacggtgaaatggacgaaccggaatccaaaggtgcgatcaccatcgctacccgtgaaaaactggataacctggtcttcgttatcaactgtaacctgcagcgtcttgacggcccggtcaccggtaacggcaagatcatcaacgaactggaaggcatcttcgaaggtgctggctggaacgtgatcaaagtgatgtggggtagccgttgggatgaactgctgcgtaaggataccagcggtaaactgatccagctgatgaacgaaaccgttgacggcgactaccagaccttcaaatcgaaagatggtgcgtacgttcgtgaacacttcttcggtaaatatcctgaaaccgcagcactggttgcagactggactgacgagcagatctgggcactgaaccgtggtggtcacgatccgaagaaaatctacgctgcattcaagaaagcgcaggaaaccaaaggcaaagcgacagtaatccttgctcataccattaaaggttacggcatgggcgacgcggctgaaggtaaaaacatcgcgcaccaggttaagaaaatgaacatggacggtgtgcgtcatatccgcgaccgtttcaatgtgccggtgtctgatgcagatatcgaaaaactgccgtacatcaccttcccggaaggttctgaagagcatacctatctgcacgctcagcgtcagaaactgcacggttatctgccaagccgtcagccgaacttcaccgagaagcttgagctgccgagcctgcaagacttcggcgcgctgttggaagagcagagcaaagagatctctaccactatcgctttcgttcgtgctctgaacgtgatgctgaagaacaagtcgatcaaagatcgtctggtaccgatcatcgccgacgaagcgcgtactttcggtatggaaggtctgttccgtcagattggtatttacagcccgaacggtcagcagtacaccccgcaggaccgcgagcaggttgcttactataaagaagacgagaaaggtcagattctgcaggaagggatcaacgagctgggcgcaggttgttcctggctggcagcggcgacctcttacagcaccaacaatctgccgatgatcccgttctacatctattactcgatgttcggcttccagcgtattggcgatctgtgctgggcggctggcgaccagcaagcgcgtggcttcctgatcggcggtacttccggtcgtaccaccctgaacggcgaaggtctgcagcacgaagatggtcacagccacattcagtcgctgactatcccgaactgtatctcttacgacccggcttacgcttacgaagttgctgtcatcatgcatgacggtctggagcgtatgtacggtgaaaaacaagagaacgtttactactacatcactacgctgaacgaaaactaccacatgccggcaatgccggaaggtgctgaggaaggtatccgtaaaggtatctacaaactcgaaactattgaaggtagcaaaggtaaagttcagctgctcggctccggttctatcctgcgtcacgtccgtgaagcagctgagatcctggcgaaagattacggcgtaggttctgacgtttatagcgtgacctccttcaccgagctggcgcgtgatggtcaggattgtgaacgctggaacatgctgcacccgctggaaactccgcgcgttccgtatatcgctcaggtgatgaacgacgctccggcagtggcatctaccgactatatgaaactgttcgctgagcaggtccgtacttacgtaccggctgacgactaccgcgtactgggtactgatggcttcggtcgttccgacagccgtgagaacctgcgtcaccacttcgaagttgatgcttcttatgtcgtggttgcggcgctgggcgaactggctaaacgtggcgaaatcgataagaaagtggttgctgacgcaatcgccaaattcaacatcgatgcagataaagttaacccgcgtctggcgtaagaggtaaaagaataatggctatcgaaatcaaagtaccggacatcggggctgatgaagttgaaatcaccgagatcctggtcaaagtgggcgacaaagttgaagccgaacagtcgctgatcaccgtagaaggcgacaaagcctctatggaagttccgtctccgcaggcgggtatcgttaaagagatcaaagtctctgttggcgataaaacccagaccggcgcactgattatgattttcgattccgccgacggtgcagcagacgctgcacctgctcaggcagaagagaagaaagaagcagctccggcagcagcaccagcggctgcggcggcaaaagacgttaacgttccggatatcggcagcgacgaagttgaagtgaccgaaatcctggtgaaagttggcgataaagttgaagctgaacagtcgctgatcaccgtagaaggcgacaaggcttctatggaagttccggctccgtttgctggcaccgtgaaagagatcaaagtgaacgtgggtgacaaagtgtctaccggctcgctgattatggtcttcgaagtcgcgggtgaagcaggcgcggcagctccggccgctaaacaggaagcagctccggcagcggcccctgcaccagcggctggcgtgaaagaagttaacgttccggatatcggcggtgacgaagttgaagtgactgaagtgatggtgaaagtgggcgacaaagttgccgctgaacagtcactgatcaccgtagaaggcgacaaagcttctatggaagttccggcgccgtttgcaggcgtcgtgaaggaactgaaagtcaacgttggcgataaagtgaaaactggctcgctgattatgatcttcgaagttgaaggcgcagcgcctgcggcagctcctgcgaaacaggaagcggcagcgccggcaccggcagcaaaagctgaagccccggcagcagcaccagctgcgaaagcggaaggcaaatctgaatttgctgaaaacgacgcttatgttcacgcgactccgctgatccgccgtctggcacgcgagtttggtgttaaccttgcgaaagtgaagggcactggccgtaaaggtcgtatcctgcgcgaagacgttcaggcttacgtgaaagaagctatcaaacgtgcagaagcagctccggcagcgactggcggtggtatccctggcatgctgccgtggccgaaggtggacttcagcaagtttggtgaaatcgaagaagtggaactgggccgcatccagaaaatctctggtgcgaacctgagccgtaactgggtaatgatcccgcatgttactcacttcgacaaaaccgatatcaccgagttggaagcgttccgtaaacagcagaacgaagaagcggcgaaacgtaagctggatgtgaagatcaccccggttgtcttcatcatgaaagccgttgctgcagctcttgagcagatgcctcgcttcaatagttcgctgtcggaagacggtcagcgtctgaccctgaagaaatacatcaacatcggtgtggcggtggataccccgaacggtctggttgttccggtattcaaagacgtcaacaagaaaggcatcatcgagctgtctcgcgagctgatgactatttctaagaaagcgcgtgacggtaagctgactgcgggcgaaatgcagggcggttgcttcaccatctccagcatcggcggcctgggtactacccacttcgcgccgattgtgaacgcgccggaagtggctatcctcggcgtttccaagtccgcgatggagccggtgtggaatggtaaagagttcgtgccgcgtctgatgctgccgatttctctctccttcgaccaccgcgtgatcgacggtgctgatggtgcccgtttcattaccatcattaacaacacgctgtctgacattcgccgtctggtgatgtaagtaaaagagccggcccaacggccggcttttttctggtaatctcatgaatgtattgaggttattagcgaatagacaaatcggttgccgtttgttgtttaaaaattgttaacaattttgtaaaataccgacggatagaacgacccggtggtggttagggtattacttcacataccctatggatttctgggtgcagcaaggtagcaagcgccagaatccccaggagcttacataagtaagtgactggggtgagggcgtgaagctaacgccgctgcggcctgaaagacgacgggtatgaccgccggagataaatatatagaggtcatgatgagtactgaaatcaaaactcaggtcgtggtacttggggcaggccccgcaggttactccgctgccttccgttgcgctgatttaggtctggaaaccgtaatcgtagaacgttacaacacccttggcggtgtttgcctgaacgtcggctgtatcccttctaaagcactgctgcacgtagcaaaagttatcgaagaagccaaagcgctggctgaacacggtatcgtcttcggcgaaccgaaaaccgatatcgacaagattcgtacctggaaagagaaagtgatcaatcagctgaccggtggtctggctggtatggcgaaaggccgcaaagtcaaagtggtcaacggtctgggtaaattcaccggggctaacaccctggaagttgaaggtgagaacggcaaaaccgtgatcaacttcgacaacgcgatcattgcagcgggttctcgcccgatccaactgccgtttattccgcatgaagatccgcgtatctgggactccactgacgcgctggaactgaaagaagtaccagaacgcctgctggtaatgggtggcggtatcatcggtctggaaatgggcaccgtttaccacgcgctgggttcacagattgacgtggttgaaatgttcgaccaggttatcccggcagctgacaaagacatcgttaaagtcttcaccaagcgtatcagcaagaaattcaacctgatgctggaaaccaaagttaccgccgttgaagcgaaagaagacggcatttatgtgacgatggaaggcaaaaaagcacccgctgaaccgcagcgttacgacgccgtgctggtagcgattggtcgtgtgccgaacggtaaaaacctcgacgcaggcaaagcaggcgtggaagttgacgaccgtggtttcatccgcgttgacaaacagctgcgtaccaacgtaccgcacatctttgctatcggcgatatcgtcggtcaaccgatgctggcacacaaaggtgttcacgaaggtcacgttgccgctgaagttatcgccggtaagaaacactacttcgatccgaaagttatcccgtccatcgcctataccgaaccagaagttgcatgggtgggtctgactgagaaagaagcgaaagagaaaggcatcagctatgaaaccgccaccttcccgtgggctgcttctggtcgtgctatcgcttccgactgcgcagacggtatgaccaagctgattttcgacaaagaatctcaccgtgtgatcggtggtgcgattgtcggtactaacggcggcgagctgctgggtgaaatcggcctggcaatcgaaatgggttgtgatgctgaagacatcgcactgaccatccacgcgcacccgactctgcacgagtctgtgggcctggcggcagaagtgttcgaaggtagcattaccgacctgccgaacccgaaagcgaagaagaagtaatttttcgtttgccggaacatccggcaattaaaaaagcggctaaccacgccgctttttttacgtctgcaatttacctttccagtcttcttgctccacgttcagagagacgttcgcatactgctgaccgttgctcgttattcagcctgacagtatggttactgtcgtttagacgttgtgggcggctctcctgaactttctcccgaaaaacctgacgttgttcaggtgatgccgattgaacacgctggcgggcgttatcacgttgctgttgattcagtgggcgctgctgtactttttccttaaacacctggcgctgctctggtgatgcggactgaatacgctcacgcgctgcgtctcttcgctgctggttctgcgggttagtctgcattttctcgcgaaccgcctggcgctgctcaggcgaggcggactgaatgcgctcacgcgctgcctctcttcgctgctggatcttcgggttagtctgcattctctcgcgaactgcctggcgctgctcaggcgaggcggactgataacgctgacgagcggcgtccttttgttgctgggtcagtggttggcgacggctgaagtcgtggaagtcgtcatagctcccatagtgttcagcttcattaaaccgctgtgccgctgcctgacgttgggtatctcgtgtaatgactggtgcggcgtgtgttcgttgctgaaactgatttgctgccgcctgacgctggctgtcgcgcgttggggcaggtaattgcgtggcgctcattccgccgttgacatcggtttgatgaaaccgctttgccatatcctgatcatgatagggcacaccattacggtagtttggattgtgccgccatgccatattcttatcagtaagatgctcaccggtgatacggttgaaattgttgacgtcgatattgatgttgtcgccgttgtgttgccagccattaccgtcacgatgaccgccatcgtggtgatgataatcatcattgtcatgatgatgatggtcatgatcgtcgtcgtcccagtcgatgctgctgaatagtgcgtacgtggtagcaacgcccatgctatagccgaatccgcgtacaaagctgtcaacaaacggttctccggctggtggtggcagataaaccggcggatacgcagtattggcccagttcccgtaaaccacggttgggttgtagttgggaatatagaccacatcaggattggcgggctcaatggaaatgacggttgttgccggctctgtaatgacggggttggcagttaaaactgtattggatggtatgacgggtgccgtgactgtctgttttaccggtacagctttcttcgttgtggtaataactttctgttcggttgatgacttcagcgagccggtttgttgcgccagttgccgcaatcgctgtaccgagtccatcacgtcctgcggctgggccagaaaagcatcgcccaggttttgcacccattgcgggttttcgcccatcaatgccatcaattgtggaaaggccaccagtgatttaacgctggcgtcccacggctggtcagataccgcctgaatagcagcatcgccttgtttaagtggattatcgtgcgaccattgcactgcttgagcaacgtttgtcggataggttgatgccatcagcacctgcgaaagtagggcgtcgggatacagcgcgacgggcgcgacccattgatctatttgtgcagtgctgaatgcggatttgacgacggcgggtgttacgggaggtgcggaaaccgttgcaggaaacgtaaccgcggcagcgtcagacacagccagttgtgtcgattgcggttccacaggcgcttccactgtgcggctttttatatatagcccggtagaggcggcacaaagcccggcactgcaaattagcgccagcacatggggtttaaacggcaaagtcattttcataattcggatctcaaggaaatcgcaatggtcggcgaactgccacccgcaggtgctgtgaatccgagtataaagaggcggtagtttaaattttgactaatcttgggattcgttgagaaaggtgattatcaccatgcgaattaacgaagtttttacggagggaaacaatctctagaccatccttaacgattcagccacttttttatgttgcttttttgtaaacagattaacacctcgtcaaaatcctgctattctgcccgttgcggtactgggcatttaccctacaaactgctgtctcacaggagcgtgaagagaatcgcctgccgcactatgacaatgagagcgaggagaaccgtcgtgctagaagaataccgtaagcacgtagctgagcgtgccgctgaggggattgcgcccaaacccctggatgcaaaccaaatggccgcacttgtagagctgctgaaaaacccgcccgcgggcgaagaagaattcctgttagatctgttaaccaaccgtgttcccccaggcgtcgatgaagccgcctatgtcaaagcaggcttcctggctgctatcgcgaaaggcgaagccaaatcccctctgctgactccggaaaaagccatcgaactgctgggcaccatgcagggtggttacaacattcatccgctgatcgacgcgctggatgatgccaaactggcacctattgctgccaaagcactttctcacacgctgctgatgttcgataacttctatgacgtagaagagaaagcgaaagcaggcaacgaatatgcgaagcaggttatgcagtcctgggcggatgccgaatggttcctgaatcgcccggcgctggctgaaaaactgaccgttactgtcttcaaagtcactggcgaaactaacaccgatgacctttctccggcaccggatgcgtggtcacgcccggatatcccactgcacgcgctggcgatgctgaaaaacgcccgtgaaggtattgagccagaccagcctggtgttgttggtccgatcaagcaaatcgaagctctgcaacagaaaggtttcccgctggcgtacgtcggtgacgttgtgggtacgggttcttcgcgtaaatccgccactaactccgttctgtggtttatgggcgatgatattccacatgtgccgaacaaacgcggcggtggtttgtgcctcggcggtaaaattgcacccatcttctttaacacgatggaagacgcgggtgcactgccaatcgaagtcgacgtctctaacctgaacatgggcgacgtgattgacgtttacccgtacaaaggtgaagtgcgtaaccacgaaaccggcgaactgctggcgaccttcgaactgaaaaccgacgtgctgattgatgaagtgcgtgctggtggccgtattccgctgattatcgggcgtggcctgaccaccaaagcgcgtgaagcacttggtctgccgcacagtgatgtgttccgtcaggcgaaagatgtcgctgagagcgatcgcggcttctcgctggcgcaaaaaatggtaggccgtgcctgtggcgtgaaaggcattcgtccgggcgcgtactgtgaaccgaaaatgacttctgtaggttcccaggacaccaccggcccgatgacccgtgatgaactgaaagacctggcgtgcctgggcttctcggctgacctggtgatgcagtctttctgccacaccgcggcgtatccgaagccagttgacgtgaacacgcaccacacgctgccggacttcattatgaaccgtggcggtgtgtcgctgcgtccgggtgacggcgtcattcactcctggctgaaccgtatgctgctgccggataccgtcggtaccggtggtgactcccatacccgtttcccgatcggtatctctttcccggcgggttctggtctggtggcgtttgctgccgcaactggcgtaatgccgcttgatatgccggaatccgttctggtgcgcttcaaaggcaaaatgcagccgggcatcaccctgcgcgatctggtacacgctattccgctgtatgcgatcaaacaaggtctgctgaccgttgagaagaaaggcaagaaaaacatcttctctggccgcatcctggaaattgaaggtctgccggatctgaaagttgagcaggcctttgagctaaccgatgcgtccgccgagcgttctgccgctggttgtaccatcaagctgaacaaagaaccgatcatcgaatacctgaactctaacatcgtcctgctgaagtggatgatcgcggaaggttacggcgatcgtcgtaccctggaacgtcgtattcagggcatggaaaaatggctggcgaatcctgagctgctggaagccgatgcagatgcggaatacgcggcagtgatcgacatcgatctggcggatattaaagagccaatcctgtgtgctccgaacgacccggatgacgcgcgtccgctgtctgcggtacagggtgagaagatcgacgaagtgtttatcggttcctgcatgaccaacatcggtcacttccgtgctgcgggtaaactgctggatgcgcataaaggtcagttgccgacccgcctgtgggtggcaccgccaacccgtatggacgccgcacagttgaccgaagaaggctactacagcgtcttcggtaagagtggtgcgcgtatcgagatccctggctgttccctgtgtatgggtaaccaggcgcgtgtggcggacggtgcaacggtggtttccacctctacccgtaacttcccgaaccgtctgggtactggcgcgaatgtcttcctggcttctgcggaactggcggctgttgcggcgctgattggcaaactgccgacgccggaagagtaccagacctacgtggcgcaggtagataaaacagccgttgatacttaccgttatctgaacttcaaccagctttctcagtacaccgagaaagccgatggggtgattttccagactgcggtttaaaaagtcagcgcacgcgctgcgcataaacgacacaatgcccggtgaatgagattcccgggcatttttttatttctaaaccatcgccgttccgctgtttttctccggtaaggctgcgataattacatcaatggcgcaatgcgatttcggtgcattgccgggagcagaggaacacactatggattacgaatttctgcgcgatattaccggagtggtaaaggtgcgtatgtccatggggcatgaagtggtcgggcactggtttaatgaagaggtgaaagaaaacctggccttgcttgatgaagtggaacaagcagcgcacgcactgaaaggtagcgaacggtcctggcaacgggcagggcatgaatacaccctgtggatggacggtgaagaggtgatggttcgcgccaatcaactggaattcgctggcgatgaaatggaagaggggatgaactactacgacgaagaaagcctgtcgctatgcggcgttgaggattttctgcaggtcgtggcggcttaccgcaatttcgtgcagcagaagtaaataaatctggcggagcctgggagctccgccagagccgttaaacagctggcatattgcgcccgtaataaatctcgcgcatttctttccacagcgcagcggtaatttcctggcgctcgctgtcggttaagtcttccggtttggtgtggaacatgtagtgcttaaggtcgaactctttaagcaacatcttggtatggaagatattttcctgatagacgttcacatccaccatgtcatacagcgccttcatatcgtcagacataaagttctgaatcgaattaatctcatggtcgataaagtgcttcataccgttaatgtcgcgggtaaaaccgcgcacgcgataatcaatggttacgatatcggactcaagctggtggatcaggtaattcagcgccttcagcggagaaatcacgccgcaggtagagacttcaatatcggcgcggaaggtacataaaccgccttcaggatgactttccgggtaggtatgtacgcaaatatgacttttatcaagatgggcaacgaccgtttctggcagtgggccggggtgttctgttttgtcgatgagtttcgggtcaaccggttcttcactcaccagaatagtgacgctggcaccctgtggttcgtaatcctggcgggcgatgttaagaatattagccccgataatggaacaggtttctgacaggatttcggtcagacggttggcattatagagttcatcgatataagcaatataaccgtcgcgctcttcggcagttttggcgtagcagatatcgtaaatacaaaaactcagacttttggtcagattattaaagccatgcagtttcagttttttcaatttcttatcttctccttaggacggctgtgaagccagtgcgtcttgcagatactgaggtaaggcaaaagctgccgtatggattgccggattgtaataacggcatttcaggccagaggcgagaaaacgcgcctgaataatttcggttgagagatggcgtaaggcgtcgttatctgtcgcccatgcaaaagtcatgataccgccgtaataggtcgggatcgccgcctgataaaagccaacgtcgctgaagtaatggctgagtttgcgatggctgtcgatggcttcttcctgctgtaaaaagcagacgccgttttgtgcgacgaagataccgccaggattcaggcaacgtttgcagccttcataaaatgccgaagtgaaaaggctttcgccgggaccgataggatcggtgcagtcggagataatgacatcaaaggtctggctggtttgattaacgaaattgacgccatcgtcgatcaccagcttaaagcgcggatcgtcgtagctaccggcgttatggttgggtagatactgacggcagaacgatacgacacccgcatcgatttccaccatcgtgattgactcaacgtttttatgtcgggttacttcacgcagcatggcaccgtcgccgccgccgataatcagcacatgtttcgcgtgaccatgggccagtagcggaacatgggtcatcatctcatgatagataaactcgtcgcgctcggtggtttgtactacgccatccagcgccattacgcgaccaaatgcagcgttctcaaaaatgatcagatcctggtgatcggtcttttcatgatacagaacgttatctaccgcaaagtactgcccaaactggtcgtgtagcgtttcatgccactgttttttttcggccatgggttgatacctcctttgttaacacccgtaaaaaaagggcgcaacataatagctaacattgaccgcggatgcacggtcaatatttctacaaaaaggtatcagggattatttgacgtaggcaagcaggcttaaggaatcgcgggccagggctttgcattttttagcgacgggaatgccaatgccgctgagatcgcggtagctgtcttcaccgagggctttcatgtcgaaggtgtcgtaattactgaggtcccactggttttgctgagcgaaaaagaccagtgcgcgacgaatttgcccgttaggtaagttctggtaaccacaatcgttcttcagaaagacaaaaactgccgttaaatcggccatatcttcggcttcagactcgctgagcgcgtaactgtttgcgcagacggccatcaggctgccgaataacactgttctgaaaaacgtcttcattgcttctaccaggggcttaaagaagataaacgttagcacactgcgagcgaggcgacgaccattattgtcgattaaattgtgtctgcggcttgaccttcccgtaaggggaaggactatgctcaacgtttgattttgtttcgcctgcttaagaataaggaaataactatgcaacgtcgtgatttcttaaaatattccgtcgcgctgggtgtggcttcggctttgccgctgtggagccgcgcagtatttgcggcagaacgcccaacgttaccgatccctgatttgctcacgaccgatgcccgtaatcgcattcagttaactattggcgcaggccagtccacctttggcgggaaaactgcaactacctggggctataacggcaatctgctggggccggcggtgaaattacagcgcggcaaagcggtaacggttgatatctacaaccaactgacggaagagacaacgttgcactggcacgggctggaagtaccgggtgaagtcgacggcggcccgcagggaattattccgccaggtggcaagcgctcggtgacgttgaacgttgatcaacctgccgctacctgctggttccatccgcatcagcacggcaaaaccgggcgacaggtggcgatggggctggctgggctggtggtgattgaagatgacgagatcctgaaattaatgctgccaaaacagtggggtatcgatgatgttccggtgatcgttcaggataagaaatttagcgccgacgggcagattgattatcaactggatgtgatgaccgccgccgtgggctggtttggcgatacgttgctgaccaacggtgcaatctacccgcaacacgctgccccgcgtggttggctgcgcctgcgtttgctcaatggctgtaatgcccgttcgctcaatttcgccaccagcgacaatcgcccgctgtatgtgattgccagcgacggtggtctgctacctgaaccagtgaaggtgagcgaactgccggtgctgatgggcgagcgttttgaagtgctggtggaggttaacgataacaaaccctttgacctggtgacgctgccggtcagccagatggggatggcgattgcgccgtttgataagcctcatccggtaatgcggattcagccgattgctattagtgcctccggtgctttgccagacacattaagtagcctgcctgcgttaccttcgctggaagggctgacggtacgcaagctgcaactctctatggacccgatgctcgatatgatggggatgcagatgctaatggagaaatatggcgatcaggcgatggccgggatggatcacagccagatgatgggccatatggggcacggcaatatgaatcatatgaaccacggcgggaagttcgatttccaccatgccaacaaaatcaacggtcaggcgtttgatatgaacaagccgatgtttgcggcggcgaaagggcaatacgaacgttgggttatctctggcgtgggcgacatgatgctgcatccgttccatatccacggcacgcagttccgtatcttgtcagaaaatggcaaaccgccagcggctcatcgcgcgggctggaaagataccgttaaggtagaaggtaatgtcagcgaagtgctggtgaagtttaatcacgatgcaccgaaagaacatgcttatatggcgcactgccatctgctggagcatgaagatacggggatgatgttagggtttacggtataaaaagaccgtattcggaaatatgcccggatctctccgggcattaaactgatgacaaacgcaaatctgcctgatgcgctacgcttatcaggcctacgctagctgtgcaatccattgattttgcacaattttgtaggctggataaggcgttcacgccgcatccggcatgaacaacgcgcacgttgtcagcaatctgagcaagtcttacttcacatcatccggcagcgcataagccacaatatagtcgcccatcttcgtaccaaatgaaccgtgaccgcctgcggagatcaccacatactgcttaccattcacttcataggtcattggcgtagcctgaccacccgctggtaaacgaccctgccacagtttttcaccgttgctcatgttgtaagcgcgcaggtagttatctgccgtagcggcgataaacagcacgttacccgccgtggagattggcccgcccagcatcggcatacccatattgaacggcaccggaaccggcatcgggaacggcatactgtcctgcggcgtaccaatacgtttcttccacaccacttcattagttttcagatccagcgccgagatataaccccatgctggctgtttacatggcagaccaaatggtgagaggaacgggttgagcgtgacaccatacggtacaccgtactgtggctgaatgccggattccgtacccgtgcctttggcatctttcggctgctccatcgggttgccaggaccacgcgggatcagtttcgaaacaaacggcagtgccattgggttggcaatcgccacttcacgatttggatcaacggaaatcccgccccattcgaacatccccaggttacccgggaagaccagcgtaccctgttcagatggcggggtgaaaatgccttcatagcgcatctggtggaacatcacgcggcacaccagttggtcaaacatggtggctccccacatatccgcaccgctcaaatctttcgtcggacggaagctcagttcagaaaacggttgagttggggttacgtaatcgcctttcgctgcaccttggggaaccggtttttccggtgccggaaccaccagttcgccattacgacgatcgagcacaaaaatgttgccggttttcgccggagcgtaaataactggcactttctgaccattaacggtgatgtccgccagcgtcggctgtgccggaagatccatgtcccacaggtcgtggtgaacggtctggtagctccacgccagtttcccggtagtggcattcagcgccagaatcgagctggcataacgttcctgttccggtgtgcggttaccgccccagatatccggcgtggtcacgcccatcggcagatagaccagatccagcttcgcgtcataggccgctggtgcccaggagtttggcgagttaaaggtaaaggtgtgttcgtcagacgggattgcgttcggatctttcgcgccgggatcaaaagcccacagcagctccccggtgttgacatcaaaaccacggatcacgccagacgtttcgcgggttgagaagttatcggtaactgaaccggccatcacgatggttttatcggtgataatcggtggcgaagtcggttcatacagacccggtttggtgtctggcatattgctttgcagattgagcacgcctttattggcgaaggtttcgcacagtttgccgttttcagcgttaatcgcaatcagtcgaccatcattgaccggaagaatgatacgacgcgggcaatccgccatcacttccggcgaagcggtttctgctttggcttcatgataagagacaccacggcaggttacgtgctggaaagactcgttggttttcagctcaggatcgtaatgccatttctctttgccgctggcggcatcaagcgcaaacaggcgctggtgagcggtacacaggtaaagggtgtcgcccactttaatcggcgtcacttcattggtgatttcacccggatcgttcggctgcttcacatcgccagtacggaacacccaggcttctttcagattatggacgttatcggcgttaatttgtttcagcggcgaaaagcgttgaccttcctgattacgaccataggcaggccagtcctgatcggctacgggggagatagcttcagcaggtgtggcatcggcgcttaaggtgccgttgatctcctgcggatcgttaaatccggcccaggtcaggataccaccgctaatcagcagtgcgaccaccagtgcggcaactgcgccgctggcaggaatgaccaggcgacgccagacaaacggcaggatcagccagatgccgaagaagaccagaatgtcgctgcgcggagtcagcgcccagaagtcgaaaccaacttcccagacgccccaaatcatggtgccgagcagcagggctgcgtatagccaaagcgcggcgcgtttactgcgccacagcatccaggcgacgccgagcatcacaaggccagcgatagggtagtaccaggagccgccaatcgcgaccagccagcctccgccaatgagtagatacagcccgcaaagcgctgcaaaaagggctgttagcgtgacgagtaatcgtcgcgagcctgtattgttaattgccataaagagacaccatttcaattcattaatattttagtagcaattaattataggttttaacatgtgtgatcgtcatcacaattcgagctttattaacagattccgcgaatgaatagttttactggtatactgcgtgtcttgcgctttgttgcggtgccaaaacctgcccgtgcgaagtgatttgtttttaaatcatatggttagagatatgaaacatactgtagaagtaatgatccccgaagcggagattaaagcgcgtatcgccgaactgggtcgtcagattactgagcgttacaaagacagcggcagcgatatggtgctggtgggtctgctgcgtggctcatttatgtttatggcggacctgtgccgtgaagttcaggtatctcatgaagtcgactttatgaccgcctccagctacggtagcggcatgtccaccacccgtgatgtgaaaatcctcaaagatctggatgaagatatccgtggcaaggacgtgctgattgttgaagatatcatcgactcggggaatacactgtcgaaagtgcgtgagatcttaagcctgcgcgaaccgaagtcgctggcgatttgtacgctgctggataaaccgtcccgtcgtgaagtgaacgtcccggtagaatttatcggtttctcgatcccggatgagtttgtggtgggttacggcattgattacgcacagcgttaccgtcatctgccgtatatcggcaaagtgattctgctggacgagtaagtgtgaagttgccggatgtgttgcatccggcatggcatttttatttgtggttggcgtgtttcagcttgaggttggaaatcccgtgacggtaacgttgctcaagggtttcgcggttggtggcggtaacatccagatcacgcagcaagccgtcgtgaatgccgtaggcccagccgtgaatggtaactttctgcccgcgtttccacgctgattgcataatggtggagtggcccaggttatacacctgttccatgacgttcagttcacacaaggtatccagacggcgctcttgcggcatttcgccgagcaatgagctatgtttgaaccagatatcgcggatatgcagcagccagttgttgataagccccagttccgggttttcaactgcggcttgtacgccgccgcaaccgtagtggccacagataataatgtgttcaacttcgagtacatccactgcatactgaaccacggaaaggcagttcaggtcagtgtgaatgaccaggttagcaacattacggtgaacaaagagttcgcccggctcaagaccggttaaacgttctgcaggaacgcgactgtcggaacatccaatccatagaaagcgcggtttttgcgcttgtgccagtttctcaaaaaacccgggatcctcttccaccagcatttttgaccatagtgcattgttgctgatgagtgtatctatgtctttcatggaggttaacgacctgtaaccaaataattacgtttggctaatatagggcaactccgggacgatttaaaccacagataaagtgtaagaacgtaaggtaagtaaaaatttatgaccattgcactggaacttcaacagcttaaaaaaacctatccaggcggcgttcaggcgcttcgtgggatagatttgcaggtcgaagcgggtgatttttatgcgcttctcgggccgaacggggccgggaaatcgaccactatcggtattatcagctctctggtaaataaaacctccgggcgggtcagcgtatttggttacgatctcgagaaggatgtcgtgaacgctaaacgtcagttgggactggtgccgcaggaatttaacttcaacccgtttgaaaccgtgcagcaaattgtggtgaatcaggcagggtactacggcgtggagcgcaaagaagcgtacatccgcagcgaaaagtatcttaaacaactcgatctatggggaaaacgcaacgaacgtgcgcgtatgttatctggcgggatgaagcgccgtttaatgattgcccgtgcgttaatgcatgaacctaaactactgattctcgacgaaccgaccgcaggcgtggatattgaacttcgccgctcaatgtggggctttttgaaggatttaaacgacaaaggcaccaccatcattctcaccacacactacctggaagaagcagaaatgctgtgccgcaatatcggcattattcaacacggtgagctggtggaaaatacctcgatgaaggcgctgctggcgaagctgaaatcggaaacctttattctcgatctcgcaccgaaaagcccgttaccgaagctcgatggctatcagtatcgactggtcgataccgcgacgctggaagttgaagtgctgcgtgagcaggggatcaacagcgtatttacgcagttaagtgagcagggcattcaggtattaagtatgcgtaacaaagctaaccgtctggaagagctgtttgtttcactggttaatgaaaaacaaggagatcgcgcatgatgcatctttactgggtggcgctaaaaagcatctgggcgaaagagatccatcgctttatgcgtatctgggtgcagacgctggtgccgccagtcatcaccatgaccctttactttattatcttcggtaacctgattggttcgcgtattggcgatatgcatggcttcagctatatgcagttcatcgtaccggggctgatcatgatgtcggtgatcaccaatgcctacgccaacgttgcgtcatcattttttggtgccaagttccagcgtaatattgaagagctgctggtagcgccggttccgactcacgtcattattgccggatatgtcggcggtggcgtggcgcgtggtctgtttgttggcattctggtgacggcaatttcactgttttttgtgccatttcaggtgcattcgtgggtattcgttgccttaacgctggtgctcacggcggtgttgttctcccttgcgggtttgctgaacggtgtgtttgccaaaacgttcgatgacatcagcctggtgccaacctttgtgttaacgccactcacgtatttgggcggggtcttttactcactgactttgttgccgccgttctggcaagggctgtcgcacctgaacccaatcgtttatatgatcagtggtttccgctacggcttcctcggtatcaatgatgttccgctggtcactacctttggcgtactggtggtctttattgtggcgttttatttgatctgttggtcgctgatccaacgtggacgtggtttgcgtagctaaggctatttcctctcctctggatttgggggagaggagttttgacggctatcaccctttatcaacaatggtcagggtagactgattttcggctaaggaggaaggcgatgttaggttgggtaattacctgtcacgatgaccgggcgcaagagatactggatgcgctggagaaaaaacatggggcacttcttcagtgccgggccgtgaatttctggcgcggattaagctctaatatgctcagccgcatgatgtgcgatgctctgcatgaagcggactctggtgagggtgtcatcttcttaaccgatatagccggagcgccaccgtatcgcgtggcttcattattaagccacaaacactcccgttgcgaagtgatttctggtgtcacgttaccgttaattgaacagatgatggcttgccgtgaaaccatgaccagttcagagtttcgcgagcgtattgtcgaactgggtgcgccggaggtgagtagtctttggcaccaacaacaaaaaaatccgcctttcgtcctcaaacataatttgtatgagtattaacccgcgattctgatggcgcttttgctacaataaaagcgttgtttcaccctcggttattttttcatgtacaaacaagctgttattctcctgctgatgctgtttaccgcaagtgtcagtgccgcgttacctgcccgttatatgcaaaccatcgaaaatgctgcggtctgggcgcaaattggtgacaagatggtgaccgtggggaatattcgggccggacaaatcattgccgtggagcccactgccgcaagttattacgcatttaattttggctttggcaaaggttttatcgataaaggtcatctcgagccggttcaggggcgacaaaaagttgaagacggtttgggcgacctcaacaagccgctgagtaatcagaacttagttacctggaaagatacgccggtctataacgcgccgagtgcgggaagtgcgccatttggggtactggcggacaatttgcgctacccgattttgcataaactgaaagacaggttaaatcaaacctggtatcagatccgtattggcgatcgactggcctatatcagcgcactggatgcccaacccgataatggcctgtcggtgctaacctatcaccatattctgcgcgacgaagaaaacacccgttttcgccatacttcgacgaccacatcggtacgcgctttcaataaccagatggcctggctgcgtgacaggggatacgcgacactgagcatggtgcagctggaaggctacgtgaagaataagatcaatctccctgcgcgagcggtggtgattacctttgatgatggcctcaagtcggtgagccgctatgcgtatcctgtgttgaaacaatatggcatgaaggcgacggcgtttattgttacctcacgcatcaaacgtcacccgcagaagtggaacccaaaatcgctgcaatttatgagcgtttctgagcttaacgaaattcgcgatgtatttgatttccagtcacatacccattttttgcatcgggtagatggttatcgccgacccatattactgagccgtagtgagcacaatattctgtttgattttgcacgttcacgccgcgctctggcgcaatttaatccgcatgtctggtatctttcgtatccgtttggcggatttaatgacaacgccgtgaaggcagcaaacgatgccggatttcacctggcggtgacaaccatgaaaggcaaagtaaaaccgggggataatccgttgttactaaaacgactttatatcttaagaacggattcgctggagacgatgtcgcggctggtgagtaaccagccgcagggataacaatcaagcaacctgtaccggaatcgctttcgcggtacgtttcatttcattgtcgccttcaaaataggcgacgttgggtcgccaggtgcgagcttcttcatctggcatggtaacgaagctggcgatgatgacaatatcgccgacactggcgcagtgggccgccgcaccgttaacagaaataattctcgaaccgcgttctgccgcgatggcataagtggagaaacgcttgccgttggtgacattccagatatcaatggcttcgttttcgagaataccggctgcgtcaagaaaatcctggtcaatggcgcaagaaccttcatagtgcaggtccgcatgagtcactttcacgcggtggagtttgccctgcagcatcgtgcgaatcataacttctacctttctaccctgtcgttaacgaagcaggcgatgcctgctttgaggaaattctcacgcagtattgcccgatttttgtttagtgtctactcatctgacggcatttgcgtcagcagtttgcgtaccgcgccgaagcgtgccatgtatcgcctgtaacgaattgatatttctctgaacgctgctcggtaaacaataaagaggtggctgacgatagcgcgccttgactggatactgccttcacgcaaagccacacggaagacagggaagatggatgcaccgagtaccacaccgcatgacgcggtatttaaacaatttttaatgcatgcggagacggctcgcgactttctggagatacatttgccagtggaattacgcgaactttgtgacctcaacacgcttcatttagagtcggggagtttcattgaagagagcctgaaaggacacagcacggacgtgctctattccgtgcaaatgcagggcaatcccggttatctgcatgttgtgattgaacaccaaagcaagccggataagaaaatggcctttcgcatgatgcgttattctatagccgccatgcaccggcatctggaggctgaccacgataagctgccgctggtggtgccgatactgttttatcagggcgaggccacaccttatccgctatcaatgtgctggtttgatatgttttactcgccggagctggcgcgacgcgtctataacagtcctttcccgctggtggatatcaccatcacaccggatgacgaaatcatgcaacatcggcggattgcgattctcgaactactgcaaaaacatattcgccagcgcgacttaatgttattgcttgagcaactggtcacgctgatcgacgaagggtacactagcggaagtcagttagttgccatgcaaaactatatgctgcaacgcggtcatactgaacaagcggatttgttttacggtgtgttgagagacagggaaacgggaggggagtctatgatgacgctggcgcagtggtttgaagagaaagggattgagaaggggattcagcagggaagacaggaagtaagtcaggaattcgcccagcgtcttctgagtaaaggaatgtctcgggaagacgttgcagagatggcaaatttacctcttgctgagattgataaggtaattaaccttatttaagttacctgtgttatgacagatgacgtggggtaaattaataactggcgccatcagccgtagcgccagttaagtattacgccagctcgaccattttgttgtcgatcaggcgagcatcgccaagccaggcggctaccagaattactgcccgtttgctggtttcagaaacttccagcaatgtgtcggcatcgcgaatctgaatatcatcggcgcggaagcctttttcattcagttcttgccccgcaatggtaataatttcatcgagatcccgttccccagcctgcaatttgtcagcaatcgaacttaaaactttgtacagaccaggcgcaattttgcgttgttccgccgtcagataaccgttacgggaacttagcgccagaccgtctttggcgcgcataattggcacaccgacaatctcaatatcgaagcccatatcggcaaccattttgcggatcagcgccagttgctgaaaatctttttcaccgaagcaggcgatgtccggctggaccaggttgaacagcttgctgacaatagtcgaaacgccgcgaaaatgtcccggacggctggcaccttccagcatggtcgaaaggccaggaacgtcaacgtaagtgtgggtttcagtaccgttcgggtagatctcttttaccgaaggggcgaaaactaaatccactttacgtttgtttagcttctcgcagtcctcctgcaaggtccgtggataacgagccagatcttccgggcggtcgaactgcatcgggttaacgaaaatactgacgacgaccacatcggcgcgggctttggcttcgtcgaccagcttcatatggccatcgtgcaggttacccatggtaggcaccagcgccacgcgcttgccttccatacgcaggcggcgaatttgctgacgcagcagcggcagggtttcgataattaacacaacgtgactccttaatggaaactgtgttcttcgcccggataaacgccggactccacttcagccatatactgccgcacagccgcgcggatgtcgcccgtttcggcgaggaaatttttagcgaatttaggaatgtgaccgccggtaataccaaaggcgtcgtgcatcacgaggatctgcccgtcagtgacgttgcctgcgccaatgccaataaccgggatcgccagtgcttcggtaatacgttttgccagttcaaccggcacgcattccagcaccagcagctgtgccccagcagcttctaaggctaatgcatcgctgagcagttgatcgcccgcttcatcgccgcgcccctgaactttgtagccaccgaaaatattcactgactgtggtgttaaacctaagtgaccacatacaggaacggcacgttcggtcagcatttgtacggtttctaccagccactcaccgccttcaattttgaccatgttagcaccggcacgcataaccgttgcggcgttttcgaaggcttgttccggcgtggcatacgccataaacggcaggtcagccagcagcaggcagtttggtgcgccgcgacgtacggcggcagtgtggtaggcgatatcggcaacggtaactggcagggtggagtcgtgcccctgaaccgtcatgcccagcgaatcgcccaccagcatgacgttaagcccttcatcagcaaagagtttggcgaagctatagtcataagcggtgatggtcgcgaaacgttttttttcctgtttgtacttctgcagtaaggagatggtggtcggtttcataacgtatcctgataaattgatgttgtgctgtctggcattttatcagtcacattggtgggggcaatgatttatccgtagcagcactgccagaaggtgacagtgctgctacgttatcagggataggttacctggaaagtactggtggctttaaattcgccgggttcgatagcaatattcccgtcttgctttaatgttgcctggaaatgaagaggctgtgatgtgccgttaccttgattagggtaaaccccatcggaggtgtcatcttcggtttcataatctatataaacagaattcgtatcattaggttttaatgtcattagcggatttttactggttgctaaaccttcaatgagtacgccaacgcctttggcggcagtgcttccagtaagcgtattaccaagcagttgtgtgttttgagtacctacttttccagtgacgagttttgtttcaatattacgcacacgaatacaattctgaagcgagatatcaaagggaacaggtgaagcgccatttttaattgtcccagagctatattctcccattctaaccgttgaaccattgactgatggcccggtaagtatggaggtaaaacatgttggtaaggttaatttgacattattcagtgtgaaattgacataaatgtggttgctgtgatctacaacttttgtaccaggactgtaggccttaaacgaataaaggtaatttgatgaactggataactggacttgctgattaagtgtaggatcgaaattagtatctgtataaaattcaacagttatgttgtgtactataccaccaatagcccaaaacttatcgtagtcgtctgctttgttgcaacccttagtttgtagatcgctgtctgtgacggaaaagaaaaattcttggttggaaggatctccgatatagattcctggcgattgaatgtcagttattgtatcgtatgcagaccagacccttgatattaacatggtgtaatacagaccaggaacagatgtattaaatagtttatgtccgccataatctttacctgaatagaccatggcattttcaatagttattggaccaggattcgctctgccagatgtattgcagtaaagaataccaccaccggtacctgtatccaggtatgaccagtacatttttaccccagtcgggccgagctgcgtgggtttataaaaaaccaagttgcttgctgttgatgtgtaattaaaggtcatctgtgcggcagtggaggggcctcgatagttatcaactcctgcattatttcccacaataaaacttgtatatgcactgactgtattacaacaagaatacagtgctaaaaaaagaatgtacctgaagatagtcttcatttttactccaatgtttctttattgttatggtttgcgctgtttttgtttgttattcgtagtaaatatccactaacacatggctcataagttgaccagatgtaacactcaatgcaggatcgattttttgcattcgggtgctaaatttccaggatgaaccattcatgtcatccgacattactggataaacggaacgagatccgcctgaagcattaagaacattgaatgtattcgccgaatcctgagtagaaaatataactactcctacattacttgctcctgacgaaatttcattagcaaatatttgcctagagccagcagccatgacaccgctaagggctctaaaatcaatatgtaactgatttagcacatcgccagttccctgtaatgcacagtcggatacagtgatagtgaactcttttccacctggttgataactttcaggagtaacattacctgaaaaatatcccaccccaacgacgccaagatcaatattaccctggttactgattccgcttttgcaggtgctgttttttacattggcaacaaggtcaatatcctgtccagcaatggctggacaggcgatgcaaaacagtaatgacagaaacagaattattctcttcatcagcttacgttgagtgggatgcatatatagttcctgaatctgtaagtctgttagttataggttactgtaaatgtggctggtgcagaaaacttacccgcagtgacattgtttacggttttatttttttccacgaccaggcgtgcactcatcggataataaacgaccgcattggctgcagtggagattgttacctcttgtgatgctggtgttacacagctaaattgtgttgcactccctgttgccggagttacagtgctccagacttcaacggcgacagcacttgctttatctgcggctgtggaaccatttgcaaaccccgcaccgtcattagcagttccctcgcatgtggctcgcttggttaattttatttgcgcttttttattggggatacccgcacagtctttgaatttgagtttgaatgtttttactttggtcttggcattgatttcagaaatatatacatcaccaaaatcaacaacagaaatgtcctgatcagagtcatttactaatgtagcggtacaagtacccatttctacagtagtaataacggtcagtccaatactgtctgttgccgcataagagagtacgctgaacaatgaggcagccaaaacgacactgctggataatccataacgtaaatttttaaatgtcatcataattatccttcttattgatagatgaaattaaacgtcgccagtgcacgaaaattccccggtacgccttgccctgcatctgtttcacgtagcgcaacggtcatttcaagacccttatcgggctgcatctcgtctgtgctccagcgtatcttttccgcactgttaggtttaaggaaagtggcatcatcagtagtccgttttttgaaacccataccgatattacttgtcgtcgaagatgaatcaccagactgcggtataataagcttaggtgagcttgatgatgcatttccggtcagagtggtatcaatccaactgatgccactgctgcacccactggcaaccagtttaaaatcagcctgagattctgtcgttttattcgcgatcttatccagacccatcttagggattctcaatgtgtagttattattgccatcattcgtgacgttattaccagtaagtgtgatgttacaggttgtcgctttgacagtggctgtaaactctacattaatatccgttgcaaatactgagggtgataataatattcccatcagtatcactattttatgtggcgttgtttttatcatttgacgtcccttgtagttactgaatctgacaccgaattccattcagaataatagattgtgctattttttctgcttctgggctttgttgataatgcgcaagacaacttacgggtttactttgttcgagccatttaatgctgatatttccctgctgctcaataccacgaacaaatgcttgtccaccctgtccaacattaccaatgacattgccttgctcatcataaatatctgcagcaaatggaatatttttaccatcacttcgtgtgatgttcataatggctgattgcccttgcacggtttcaaaatcagcaaagacgactgaaccctgacgcggtacagctactgcactggtactttttaattcaacatcgttctcaagatcgttgatatccagcgcgatacggttttcatgataaggagaaagagcgctggtgacaccataaccccatcgatcgatagtactgttgccataatttattcgcgctccttgagcacctggagcctgaactaccgccagtgtatcggagtcgctaaaactatcattactgaaagtcagtccaccgctatgcaatacaaaaccaccgtcggtgctgagagaaacttgacggctgttatcgctatttgcagaaattgaacctgccagcgttccccatggtgactcatagctggcataacccccaacataactcaaatctttgctggctttattcatcgtatagccagtattcacgctataactgacgcgagcgttatcgctatagccactgctgctaacgttgagttggttattacccttaaagtcactgcttatttgagtatcaatactctggaaacctgaagtacgttgttcagtgccaagtaatttttcaattggaatggtgaaactaagataaacgctatcgtcagtgtcgccgtcttcattccatgaacgctgggcactgacactgtagctgccccaggatgtactgttactgtagccaatagagtaattgctacgattttgtccggaagcccagtaatcggaccaacttccggaaagataaaatgaaccgtaatcttttttctcaaatttcaacggttggttaatactgaccgtaacctgatttttcatgcgtgagtaattacgcatggatttcggttcaagatcttgttcgggatgtttcacttcatcaattagagttagtgcatcattaagaccaaggtaattctgtgtcgaatagcgataggccgcgatattcagtgaagtacttgtttcttcgaataacttgttccaggaaacacgataactttgcccctggtatgttttatcatccgggatacgaacattggaatgagtcacatcgaaagaaaatgcaccaactgaagtattcagaccaagacctaacaaaccagcggtatagttattatcggttatctgaataccggtataacccgtcagatagttattcaggccgtagtagtagcttgcttgaaataaattaggctcatcctgaatatcatcttttaagacctgaccgccgctaatatcccaacgtccaacgccagggcgtaacatttgaacaacggatgagaaaggttgcgagaatgtccgctttgagccatcggattcttcgatggtaacaataagatcgctgccgtaccctgacggactcagatcatcaatgacgaaagcgcctggcggcaccgtcgtttcataaatcttatagccaccttgcgtaatagtgactttggcgttggtattggcaacgccatgaatgataggcgcaaagctggctaaagtcggaggcaacatgcggctgtcactgtataaacgaatgcctcggatactgacggaatcaaaggtttcgcccgtcgtataagactcaccaagaatgagttgagaacgcagcgaggcgatatcacgctgaacataccgattcttaaaatcataattactgccagaatcggtcatccagttgtagttgcccgaggcacgcagtcgccatgcacctaaattcatcccaccgttaaatgcagcataaatgctttcattttttcgaccaggggtttcactatgatatccgttgaggttgtatgacaacatggccgcattaatgccgttttcccataacgatggatcaacatagttttggtaatttttcattacccaggcttgaggaacgtctatatccagacgttgatcgttaacgtcataacgaacagaagcctgagggataatttccgtcaaattgaggcaattgccgagcgtttcatccctggcaagcagaacggctttttcgttatttatatcgggagaattaatatgaaactgcaataaattctttaatgtgatacaagcctgggcgttcttttttccttcaattgcgacaaatgtaatactttggttaatgattggttggtcgtttacataaacactgacgtcgtaaacacccggtatagcggggttaccttcactgtaccggctgagatcaatattagatgcattctgccccatcaggaaggtatggtcatattcaacgagttcagcactgaaagcagtattgcaatacagcagcgcgcaaaacgtggcgatacgggtcagatgatgataatttttagtatattctatagtcacgctatgcttcctgcggaattatatccttgcctgattacagcctggcattaccttcaattgcgccaccaaagtcattaatggcgtaaaaatgcacttttgcagaattcgctttgccattaaggccattgactttcatgacctcatcactaaatggtgcaatcattttcacatcaatcggatagcgtttaccgctagcttctaaatcaccactgctaaaagagacgtagtaaggggttggattggtcactcgtaatgacgccttaccttctgaacctgaccagaaccacttcagggctaacggggcttcagagggatttcccttcaatccatccgggcgatagaaaagttttatacgtgtgcgaaatgccagttgcagcaggctttgattcgcgaccttttctgcatctggttttggtggaacttccagtacgttaaaccagaacacgctctctctgtctttaggcagtgaggtgctggctgtgtacattaatttgattgtttgcccacgtttggcatcaatacgcgatactggcggcgtagcagtaaaagggactgtaatactgccaggctcagcgttgtcatcgccagtatctaaccaactctggacaagcaacgggttattccctttattttccagacgtacgttgacacttttttgatcgcttttatatattacgcgagtacccgaaatgacaatgtccgcaatagacgatgaactaaaagccatacaggttacgaagcataaagctgttgtatgtttggtgttaaaaaacataaaccatccctgatagagttaattaaaacagggaataatataaaatagaaattattattccctgtatattcattcaatcaatttaactggtgaatacttactgataagtaatggtgtatgcagtgttagtttttacataaccagcagttgctgtttggtctgcgacggcacgaacgtaagacgctttaaaatcataaacagcagattttgtcgttgcatccagggctttagtatacacatcgccagggttgttaatttgaacctgtttgatagtggaaccatcaatattgtgtagagcgatattaacgccgtcagatgggttgttaatagacatgtcgttgttcaaagtccctttgctgttaccaaagaaaacagaaccgaaggtcattttagccgtgctacctggattcggatttgctttgctgcagtcaacggtgatgctgaaaggtttagctttagcgccaacggtgtcattcagtacgccagcatcgatttcaccaacggttgcggtttgcagcaggatcagaccatccttgttaccgccgtcaacgcgggtttcacaggtgttatcaacaaccagaccactgatatttaactgaccgccgtccatatcagcagaagcagtacctgcaaccatcgccagcataagaccagacagggcaaaacctaattttttagacataaaaatcctttaataaaattccattagtcagactacatgtttgaagaatgactattcatgacacaaataggagaaacaaatgttagatattaatgagcaatgatatttgttacccaaatttacaaccattgttcattaggtcgcctattgtgcactttagaagcttttgaacaaattaaatttacttaattcaaaattaagtaaaaataagttcacaagtgcaattggttagggtatggagatgggattgatatttatttataggaagttatattatttccgcaaagagatgtttaaactaaaatcgtaattaaggaaagagatgagatatgattttcagaaaatatttatattcgcaatataaataaattaccatttgtttaatttgtcaaatgctcttgtatgtaagatttgacgcaacatctccccatcaggaaacaccaactccggcgcgatttcaaacagcggccacagcataaatccacgattcttcatatcgtagtgcggaacggtcaggcgttcagtatttatcacttcattaccaaacagcatgatgtcgagatccagcgtgcgtggtccccagcgttcagctttgcggacgcgaccttgctgcaattcaatacgctgtgtgtgattgagtagctcttcaggtgcaagagaggtttccagcgccacggctgcgtttaagtaatcgggttgatcttgcggccccagcggtggggtgcggtaaaacgaagaaacggtaagaatgtggctttcagggatatcgcctaatgctttcagggcagcattgacctgctccagcggagaggccagattgctgcctatggcaatatacgccactgtcatgcggtaccctcacgacgtggtgcgcgtttgcgtggacgacgagtacgacgacgcggtgacggttcttcatccagctcgttgagcatccctttttggtctggtggcgcggaaacctggaactcaccccaccatttcaccagacgctgcagttcagcgttacgctcaacttcagctcgcaaggccaacaggtcataagccgcacggaacttaggatgctccagcagtttccatgcgcgtttaccctgacgacgggacatacgcaactgcaactgccagatatcgcgggttaatgtcgtcagacgtttcgggattgccagtgaacggcaggcttcgtccagcacgtcgttcatcgccagcgcgaaagcgtcgtgataggtcaggccgctttcctgggcgatcttctgtgccgtctccagcagtgggtaccagaacatggcggcaaacaggaacgccgggttcacgcgcatatcgttatggatacgcgtatcggtattcttcagcacctgttcaatgatccgctccatcgggctgtcgccattttccgtgaagtagcgggtaatggtcgggaacagcggctggaacagatgatattcacacaacagcttataggtttcgtaaccgtagcccgcttgtagcagtttaagcgattcttcaaacaggcgtgccggtgggatatcgttcagcagggtagcgaggcgagggatcggttctgcggtttccgggctgatgcgcatacccaatttggcggcaaaacgtaccgcgcgcagcatacgtaccggatcttcacggtagcgcgtttccgggttaccaatcagacggataacgccgtccttcagatccttcatgccgccaacgtaatcacggacggtaaaatccgctacgctgtaatacaggctgttgatagtgaaatcgcggcgctgggcgtcttcttcgatggagccgaaaatgttgtcgcgcagcaacatgccgttttgcccgcgttgggaggtcgtgcggtcgctgacgttaccttcgtggtgtccacggaaggtcgcaacttcgataatctccgggccaaacattacatgagccagacggaaacggcgacccaccaggcggcagttacggaacagtttgcgcacctgctcaggcgtggcgttagtggttacgtcaaaatctttcggctttttgccaagtaacaggtcgcgcacgccgccgccaaccagccaggcttcgtatcccgctttattgagcctgtacattaccttcagggcattttcactgatatctttgcgggaaatagcatgctgctcacgcgggatcaccgtcacctgtggacgggcgactgcctgttcagcctcgctttcctcgcggcttagcaccttgcggcaaaaattagcgactcgggtaaaaatagtacacctcggtagtgtcaaacatcattcaggacaaaaaaatagcggctaatcatagctcagcatgacgcatttgagaatgttgaatttacaattgccgactcgggcacggcggtaagccgccagtttttgacggctgactgaaggatttgctcgacgctgaaatcctgccagtgtgcttctgcctgctgccccagaaattgaagtgccgcgattagtaccgggcgtggatcgcctttcggcaacgcaggcgcatgattctgcttggaaagtttagcgccttgtggattaagcgccagcggcagatgaatgtaatctggcactttccagccaaaaagctggtacagcgagatttgccttactgttggttcaatcagatcagccccacgcactatttctgtaacgccctggaaatgatcatcaaccacaacagccaggttgtaggcgaacaacccatcacggcgatgaatgataaaatcttcccgtgccagtttttcgtcggcgtgaataatgccgcgcagctggtcagtaaattgcgtgaccggatgctgctggcggatacgcactgcggcgttgtctggtccatgatgcaacacccggcaatgaccgtcgtaaataccgccaatgctttgaatacgcgcacgcgtacaggtgcagtaataacttagtccttgttcatgtaaccaggcgagtgcttcacgataggcgtcgtgacgttgcgattgccagagaacatcgccgtcccagtgcagaccgtaatgttccagctggcgcaggatagtttctgcggcaccgggaacttcacgaggcgggtcgatatcttctatgcgtaccagccagcgaccttgccgggcgcgagcctgcaaatagctgccgagcgcggcgatcagagagccaaaatgaagctcgccggaaggagagggggcgaagcggccaatatactgtgtgtctgtcatctctttgaacaaaaaataaggcgggagcatttcccgcctgtggtaaacgtgatggaacggctgtaattagccagccatctgtttttcgcgaatttcagccagcgttttgcagtcgatgcacagatcggctgtcgggcgcgcttccagacggcgaataccaatttcaacaccgcaggattcgcagtagccgaaatcttcgtcttccacttttttcagcgtcttctcgatctttttgatcagcttacgctcgcgatcgcggttacgcagttcgaggctgaactcttcttcctgggctgcacggtctaccgggtccgggaagttggctgcttcatcctgcatatgtgtaacggtgcgatcgacttcatccctgagttgattacgccatgcttccagaatacgacggaagtgcgccagctgggcttcattcatatactcttcgcccggcttctcctgatatggttccaccccagcgatggcgagaatactcagggacgatgttttacggttttgcccttcttgcatgttgcttctccttaacacgcactatcgatccccatgttcgggggaaaaatgaggccgctataaatagcagatgcttttccggatagcaattatctaaacgtaacacttgacaactgtgtgaggaaaagcgtatttgcgcacgcgaccagaatgtaaattaaccagttacttactttactacaatgtaaccggcagtgattttttaagagccatgccttcagcagaaatttccgctttgtaagccagaatttctacccccctctgttgagcttctgacaatagttgcgcgtatttctcatcgatgtggcgcgcgggtgaaaaccgtgtaatggctgaatgcagcacggcgaaaaagataaccgcacgctggccttcagccgctacgctcatcaactcccgaaggtgtttctgacctcgttcagtgaccgcatcgggaaaatatccctgttcgttctccgctaacgtaaccgatttcacttcaatatagcagtctggacgcgaatccgcctgcaacataaagtcaatacggctgcgttctgcgccgtattttacttcgcttttcagcgagctatagcctgacagttctgaaattgattcattaaggatagcctctttcgtcaacctgttagcccaaagcgtgttgacgcaaataaatgcgccgctctggctttgagttaattcccaggtgtgtgggtatttccgtttggtgttgtctgaagtcgaataccagacggtatcgccaggcgttgcacaaccggtcatcgcacccgtattcgggcagtgtagcgttaattcgcgaccatcgggtgtgatcacatcggctaaaaaacgtttgtaacgctgaattagcgtcgcgcgctgtagagggggagaaaattccattgcgacaatccttgttattgcgttagcgcccagcgttttagcggcgtgtagcgtgtgcgtccacgggcaaacgaggaggcgtaaagggtgaactccgtcaccgcatacgaccagttaaaacctggcggcgggattgtcaccgcctcgctggcgtcgcgcaataaggtaatatgtggatgaaacggacgattgctttgaaaacaaccgctgcgggcagcctgtgaacggagcatattcgccagctggattaagccgcgtggcggctgacgcatccctaaccacaccacacgcgaacgcagccattgtccggcgtcatcaagcgtgagtgtgaaaccaggttgacgaatccgtccggctaaaagagaaagcgccttctctttctcggcgctcacttcgcctaaaaatgccagagtcagatgcaaattatcggcggcgaccggacgtcccgcctcaggtgggaagtgtgtggcgcgccaatggataatctgttcgcggatttctgcaggtaagtcgatagcaaagaacagacgttgcggttcagacatgtgaggcactcggttatgaattaccgcgatgctacaatgtggcgcgaagaatgttaaccctctggagcgttttgtgtcgtcgttgcccgttgctgccgtcttacctgaattacttaccgctctcgattgtgcgccgcaggtattattaagtgcgccgaccggggccgggaaatcaacctggctgccgctgcaactgctggcgcatcccggcattaacgggaaaattatcctgctggagccgcgtcgtctggcggcgcgtaacgtcgcgcaacggctggcggagctgcttaacgaaaagccaggcgataccgttggctaccggatgcgtgcgcaaaactgcgtcgggccgaatacccgcctggaagtggttaccgaaggcgtgctgacgcgcatgatccagcgtgacccggaactgagcggtgttggactggtgatccttgatgaatttcatgagcgcagcttgcaggcggatttggcgttggcgctgttactcgatgtgcaacaaggtctgcgtgatgaccttaaactgctgattatgtcggctaccctggacaacgaccgcttgcagcaaatgctgccagaagcgcctgtcgtcatctcagaagggcgctcgtttccggttgaacgccgttatttaccgctgcccgcgcatcagcgttttgacgatgccgttgcggtagccaccgctgaaatgctgcgtcaggaaagcggatcattactgttatttttacctggcgtcggagaaattcagcgtgtgcaggaacaactggcttcgcgcatcggcagtgatgtattgctctgcccgctgtatggcgcgttgtcgctgaacgatcagcgaaaagcgatcctcccggcaccgcaagggatgcgcaaagtggtgctggcgaccaatattgctgaaaccagtttaaccattgaaggtattcgtctggtggtggattgtgcccaggagcgtgtggcgcgttttgatccgcgcacggggcttacgcgactgattactcaacgcgttagccaggcatccatgacgcagcgtgccgggcgcgccgggcgtctggagccgggtatcagcctgcatttaatcgccaaagaacaagcagaacgcgccgcggcgcaaagtgaaccggagatcttacaaagcgatctttccggtttgctgatggaattactgcaatggggatgcagcgatccggcgcagatgagctggctggatcaaccgccagtagtgaatctactggccgcgaaacgtctgttacaaatgctgggggcactggagggtgaacggcttagtgcgcaagggcaaaaaatggcagcgctgggtaacgatccgcgtttagcggcaatgctggttagcgcgaagaacgacgacgaagctgctaccgcggcaaaaattgccgccattctcgaagagccgccacggatgggcaatagtgacctgggcgtggcgttttcgcgcaatcaaccagcctggcagcaacgtagtcagcaactgttaaaacgcttaaacgtacgtggcggtgaggcagacagttcgcttatcgcgccgctacttgccggggcgtttgccgatcgcattgctcgtcgccgtgggcaagatggacgctatcaactggcaaacggcatgggagcgatgctcgatgccaacgacgcgctaagccgccacgaatggttgatcgcaccgttattattgcagggcagcgcctcgccggatgcgcggattttactggcgctgctggtcgatattgatgagttagtacaacgctgcccgcagctggtacagcagtctgacactgtggagtgggatgacgcgcaaggtacgctgaaagcctggcgtcggctacaaatcggtcagttgacggtgaaagtgcagccgctggcgaaaccgtcagaagacgagttgcatcaggcgatgcttaatggcatccgtgataaaggtttaagcgtgctcaactggacggcggaagcggaacagctacgcttgcgtttgttatgcgccgcaaagtggttgccggaatatgactggccagcggttgatgatgaaagtttattggcagcgctggaaacgtggctgctgccacatatgactggcgtacattcactacgcggcctgaaatcactcgacatttatcaggcactacgcggattacttgattggggaatgcagcaacgtctggatagtgaattgcctgcgcattacactgtgccgacgggaagccggatcgccattcgttatcatgaagataacccgcccgcgctggcggtgagaatgcaagagatgtttggcgaggccaccaatccgacgatcgcccaggggcgcgtgccgctggtgctggagttgctttcacctgcccaaaggccattacaaatcacacgagatttgagcgacttctggaaaggagcgtaccgtgaggtgcaaaaagagatgaaagggcgttatcccaaacatgtctggccggacgacccggcaaatactgcaccgacgcgacggacgaaaaagtattcgtaaggttggttttctccctctccctgtgggagagggccggggtgagggcatcagcgcgcacgttcaccctcaccctaaccctctccctcaagggagaggggaccgatcgagcacaaattttgagagatatcttcttctgtcttgtaacagaagaacagaaaatcgggcttttgcgcctgaatattgcggagaaaaagcatggccgggaatgaccgcgagccaattggacgcaaagggaaaccgacgcgtccggtcaaacaaaaggtaagccgtcgtcgttacgaagatgacgatgattacgacgattatgatgactatgaggatgaagaaccgatgccgcgcaaaggtaagggcaaaggcaaagggcgtaagcctcgtggcaaacgcggctggctatggctactgctaaaactggctatcgtttttgccgtgctgatcgccatttacggcgtttatctcgatcaaaaaattcgtagccgtattgatggcaaggtctggcaactgcctgcggcagtttatggccgaatggtcaatcttgagccagacatgaccatcagcaagaacgagatggtgaagctgctggaggcgacccagtatcgtcaggtgtcgaaaatgacccgtcctggcgaatttaccgtgcaggccaacagcattgagatgattcgccgtccgtttgatttcccggacagtaaagaaggacaggtgcgcgcgcgtctgacctttgatggcgatcatctggcgacgatcgtcaatatggagaacaaccgtcagttcggtttcttccgtcttgatccgcgtctgatcaccatgatctcttcgccaaacggtgagcagcgtctgtttgtgccgcgcagtggtttcccggatttgctggtggatactttgctggcgacagaagaccgtcatttttacgagcatgatggaatcagtctctactcaatcggacgtgcggtgctggcaaacctgaccgccggacgcacggtacagggtgcgagtacgctgacgcaacagctggtgaaaaacctgttcctctccagcgagcgttcttactggcgtaaagcgaacgaagcttacatggcgctgatcatggacgcgcgttacagcaaagaccgtattcttgagctgtatatgaacgaggtgtatctcggtcagagcggcgacaacgaaatccgcggcttcccgctggcaagcttgtattactttggtcgcccggtagaagagctaagcctcgaccagcaggcgctgttagtcggtatggtgaaaggggcgtccatctacaacccgtggcgtaacccaaaactggcgctggagcgacgtaatctggtgctgcgtctgctgcaacagcaacagattattgatcaagaactctatgacatgttgagtgcccgtccgctgggggttcagccgcgcggtggggtgatctctcctcagccagcctttatgcaactggtgcgtcaggagctgcaggcaaaactgggcgataaggtaaaagatctctccggcgtgaagatcttcactacctttgactcggtggcccaggacgcggcagaaaaagccgccgtggaaggcattccggcactgaagaaacagcgtaagttgagcgatcttgaaactgcgattgtggtcgtcgaccgctttagtggtgaagttcgtgcgatggtcggaggttctgagccgcagtttgcgggctacaaccgtgcgatgcaggcgcgtcgttcgattggttcccttgcaaaaccagcgacttatctgacggccttaagccagccgaaaatctatcgtctgaatacgtggattgcggatgcgccaattgcgctgcgtcagccgaatggccaggtctggtcaccgcagaatgatgaccgtcgttatagcgaaagcggcagagtgatgctggtggatgcgttgacccgttcgatgaacgtgccgacggtaaatctggggatggcgctggggctgcctgcggttacggagacctggattaaactgggcgtaccgaaagatcagttgcatccggttccggcaatgctgctgggggcgttgaacttaacgccaatcgaagtggcgcaggcattccagaccatcgccagcggtggtaaccgtgcaccgctttctgcgctgcgttcggtaatcgcggaagatggcaaagtgctgtatcagagcttcccgcaggcggaacgcgctgttccggcgcaggcggcgtatctgacactatggaccatgcagcaggtggtacaacgcggtacgggtcgtcagcttggggcgaaatacccgaacctgcatctggcagggaaaacagggactaccaacaataacgtagatacctggtttgcgggcattgacggcagcacggtgaccatcacctgggtcggccgtgataacaaccagccgaccaaactgtatggtgccagcggggcaatgtcgatttatcagcgttatctggctaaccagacgccaacgccgctgaatcttgttccgccagaagatattgcagatatgggcgtggactacgacggcaactttgtttgcagcggtggcatgcgtatcttgccggtctggaccagcgatccgcaatcgctgtgccagcagagcgagatgcagcagcagccgtcaggcaatccgtttgatcagtcttctcagccgcagcaacagccgcaacagcaacctgctcagcaagagcagaaagacagcgacggtgtagccggttggatcaaggatatgtttggtagtaattaacatctaagcgtgaaataccggatggcgagttgccatccggtaaaataacatcccatctaagatattaaccctttcttttcatctggttgtttattaacccttcaggaacgctcagattgcgtaccgcttgcgaacccgccagcgtttcgaatattatcttatctttataataatcattctcgtttacgttatcattcactttacatcagagatataccaatggcgcgttccaaaactgctcagccaaaacactcactgcgtaaaatcgcagttgtagtagccacagcggttagcggcatgtctgtttatgcacaggcagcggttgaaccgaaagaagacactatcaccgttaccgctgcacctgcgccgcaagaaagcgcatgggggcctgctgcaactattgcggcgcgacagtctgctaccggcactaaaaccgatacgccgattcaaaaagtgccacagtctatttctgttgtgaccgccgaagagatggcgctgcatcagccgaagtcggtaaaagaagcgcttagctacacgccgggtgtctctgttggtacgcgtggcgcatccaacacctatgaccacctgatcattcgcggctttgcggcagaaggccaaagccagaataactatctgaatggcctgaagttgcagggcaacttctataacgatgcggtcattgacccgtatatgctggaacgcgctgaaattatgcgtggcccggtttccgtgctttacggtaaaagcagtcctggcggcctgttgaatatggtcagcaagcgtccgaccaccgaaccgctgaaagaagttcagtttaaagccggtactgacagcctgttccagactggttttgactttagcgattcgttggatgatgacggtgtttactcttatcgcctgaccggtcttgcgcgttctgccaatgcccagcagaaagggtcagaagagcagcgttatgctattgcaccggcgttcacctggcgtccggatgataaaaccaattttaccttcctttcttacttccagaacgagccggaaaccggttattacggctggttgccgaaagagggaaccgttgagccgctgccgaacggtaagcgtctgccgacagactttaatgaaggggcgaagaacaacacctattctcgtaatgagaagatggtcggctacagcttcgatcacgaatttaacgacacctttactgtgcgtcagaacctgcgctttgctgaaaacaaaacctcgcaaaacagcgtttatggttacggcgtctgctccgatccggcgaatgcttacagcaaacagtgtgcggcattagcgccagcggataaaggccattatctggcacgtaaatacgtcgttgatgatgagaagctgcaaaacttctccgttgatacccagttgcagagcaagtttgccactggcgatatcgaccacaccctgctgaccggtgtcgactttatgcgtatgcgtaatgacatcaacgcctggtttggttacgacgactctgtgccactgctcaatctgtacaatccggtgaataccgatttcgacttcaatgccaaagatccggcaaactccggcccttaccgcattctgaataaacagaaacaaacgggcgtttatgttcaggatcaggcgcagtgggataaagtgctggtcaccctaggcggtcgttatgactgggcagatcaagaatctcttaaccgcgttgccgggacgaccgataaacgtgatgacaaacagtttacctggcgtggtggtgttaactacctgtttgataatggtgtaacaccttacttcagctatagcgaatcgtttgaaccttcttcgcaagttgggaaggatggtaatattttcgcaccgtctaaaggtaagcagtatgaagtcggcgtgaaatatgtaccggaagatcgtccgattgtagttactggtgccgtgtataatctcactaaaaccaacaacctgatggcggaccctgagggttccttcttctcggttgaaggtggcgagatccgcgcacgtggcgtagaaatcgaagcgaaagcggcgctgtcggcgagtgttaacgtagtcggttcttatacttacaccgatgcggaatacaccaccgatactacctataaaggcaatacgcctgcacaggtgccaaaacacatggcttcgttgtgggctgactacaccttctttgacggtccgctttcaggtctgacgctgggcaccggtggtcgttatactggctccagttatggtgatccggctaactcctttaaagtgggaagttatacggtcgtggatgcgttagtacgttatgatctggcgcgagtcggcatggctggctccaacgtggcgctgcatgttaacaacctgttcgatcgtgaatacgtcgccagctgctttaacacttatggctgcttctggggcgcagaacgtcaggtcgttgcaaccgcaaccttccgtttctaatttctcttttggggcacggatttccgtgcccatttcacaagttggctgttatgcaggaatacacgaatcattccgataccacttttgcactgcgtaatatctcctttcgtgtgcccgggcgcacgcttttgcatccgctgtcgttaacctttcctgccgggaaagtgaccggtctgattggtcacaacggttctggtaaatccactctgctcaaaatgcttggccgtcatcagccgccgtcggaaggggagattcttcttgatgcccaaccgctggaaagctggagcagcaaagcgtttgcccgcaaagtggcttatttgccgcagcagcttcctccggcagaagggatgaccgtgcgtgaactggtggcgattggtcgttacccgtggcatggcgcgctggggcgctttggggcggcagatcgcgaaaaagtcgaggaagctatctcgctggttggcttaaaaccgctggcgcatcggctggtcgatagtctctctggcggcgaacgtcagcgggcgtggatcgccatgctggtggcgcaggatagccgttgtctgttgctcgacgaaccgacctcggcgctggatatcgcccaccaggttgatgtgctgtcgctggtgcaccgtttaagtcaggagcgtggcctgacggtcattgccgtgttgcacgatatcaatatggcggcacgctactgtgattatctggtcgccctgcgcggcggtgaaatgattgctcagggaacgcctgcggaaattatgcgcggcgaaaccctcgaaatgatttatggcatcccgatgggtattttgccgcatccggcgggtgctgcacctgtgagttttgtttattgatgagcggcttacctcttatttcgcgccgtcgactgttaacggcgatggcgctttctccgttgttatggcagatgaataccgcccacgcggcggctattgatcccaatcgtattgtggcgctggagtggttgccggtggaattactgctggcgctcggcatcgtgccttacggcgtggcggataccatcaactatcgcctgtgggtcagcgaaccaccattgccggactcagtgatcgacgtcggtttgcgcacagaacctaaccttgaactgctgaccgaaatgaaaccatcgtttatggtctggtcggcaggatatggcccttcaccagaaatgctggctcgtattgcgccgggtcgcggatttaacttcagtgacggcaaacagccgttggcgatggcgcgtaaatcgctgacggaaatggcagatttacttaacctgcaaagcgcagcggaaacgcatttagcgcaatatgaagactttatccgcagcatgaaaccccgctttgtgaagcgtggtgcgcgtccgttattgctgacgacgcttatcgatccgcgccatatgctggtcttcggtccaaacagcttgttccaggaaattcttgatgagtacggcatcccaaatgcctggcaaggggaaaccaacttctggggcagtaccgccgtcagtatcgatcgtctggcggcgtataaagacgttgatgtgctctgttttgatcacgacaacagcaaagacatggatgcgctaatggcaacgccgctgtggcaggccatgccgtttgtccgcgccggacgctttcagcgcgtacctgcagtctggttttatggtgcgacgctctcggcaatgcactttgtgcgcgttctggataacgccatcggaggtaaagcgtgagtaaacgaattgcgcttttcccggcgttattgctggcgctgttagtgattgtcgctacggcgctcacctggatgaacttctcgcaggcgctgccgcgtagccagtgggcgcaggctgcctggtcgccggatattgacgtcatcgagcagatgatttttcactacagcttgttgccgcgtctggcgatttcgctgctggtgggcgcgggtctggggctggtgggcgtgctgtttcagcaagtgctgcgtaacccgctggcggagccgacgacgcttggcgttgctacaggcgcgcaactggggattaccgtcactacgctctgggcgatccctggtgcgatggcgagccagtttgctgcgcaggcaggggcttgtgttgttggcttaattgtctttggcgtcgcgtgggggaaacggctgtcgccggtaacgctgattctcgcggggttggtagtgagcctttattgcggcgcaatcaatcagttactggttatcttccatcatgaccaactgcaaagcatgtttctgtggagcactggaacgctgacgcaaaccgactggggcggcgttgagcgtttatggccgcagctgctgggcggtgtgatgctgacgttgctgctacttcgtccgttaaccctgatggggcttgatgatggcgtggcgcgcaatctcgggctggccttgtcgcttgcgcgtctggcagcgctgtcgctggcgattgtcatcagtgcgctgctggtgaacgctgtggggattatcggctttatcgggttgttcgcgccgctgctggcaaaaatgctgggggcgcggcgtctgctgccacgactgatgctggcgtcgttgattggtgcgctgatcctctggctttccgatcaaatcatcctctggctgactcgcgtgtggatggaagtgtccaccggttcggtcactgcgttgatcggtgcgccgctgctactgtggctgttgccgcgtttacgcagcattagcgcgccggatatgaaggtcaacgatcgtgtcgcggctgaacgccaacatgtgctggcgtttgccctcgcgggcggcgtgctgctgttgatggctgtggtggtggcgctgtcgtttggtcgtgatgcgcacggctggacgtgggcgagcggggcgttgctcgaggatttaatgccctggcgctggccgcgaattatggcggcgctgtttgcgggcgtcatgctggcggtggcgggctgtattattcagcgactgaccggaaacccgatggcaagcccggaagtgctggggattagctccggcgcggcgtttggcgtggtgttgatgctgtttctggtgccgggtaatgcctttggctggctgttacctgcaggcagtctcggcgcggcggtgacgctgttgatcattatgatcgccgccggccgcggtggattttccccacaccgtatgttactggcggggatggcgttaagcaccgcgttcaccatgcttttgatgatgttgcaggcaagtggtgacccgcgaatggcgcaagtgctgacctggatttccggttcgacctacaacgcgaccgatgcgcaggtctggcgcaccggaattgtgatggtgattttgctggcgattaccccgctgtgccgccgctggctgaccattttaccgctgggtggtgataccgcccgagccgtaggaatggcgctgacgccgacgcgaattgcgctgctgctgttagcggcttgcctgacggcgaccgcgacgatgactattggaccgttgagttttgttggtttaatggcaccgcatattgcgcggatgatgggctttcgacggacgatgccacacatcgtaatttcggcgctggtgggtggtttactgctggtgttcgctgactggtgtgggcggatggtgctgtttccattccagatcccggcggggctgctgtcaacctttatcggcgcgccatattttatctatttgttgagaaagcagagccgttaatttttccatataacggccctgtacgcctggacggataaagcgtttacgcgacaacggatgcccgatgcgacgctggcgcgtcttatcgggcctacaaacggccccgaatcgtaggtcggataaggcgttcacgccgcatccgacaaaccatgctggatcacaacttcgcaaacacccgacgtgcagcatcgatggtgttattgatatcttccatgctgtgcgccacggacataaagcccgcttcaaacgctgacggtgccaggtaaacaccttcgtccagcatcatatggaagaaacgcttaaagcgttccacgtcacaggccatcacatcctgatagcacgtcacggactcggcgtcggtaaagaaaataccgaacatgccgccaacgtggttaacgaccagcggaattccggcttcttctgccgcttccagcagaccttctgccagacgtgttgtcagctcatccagcgtttcgtgaacgcccggctgcgcgacttcattcagacaggcgaaacccgctgccatcgcaatcgggttaccggaaagcgtacccgcctgatagaccggacccgtcggggccagcgcatccattacatcacgacgaccaccgaatgcgcctaccggcattccaccgccgatgattttgccgaggcaggttaaatctggcactacgccgtaataatcctgtgcgccagctagcgctacgcggaaaccggtcatcacttcatcgatgatcagcaacgcgccaaattcgtcgcacagcgcgcgcagacctggcaggaactctggcagcggcggaacacagttcatattgcctgccaccggctcgacgataatacaggcaatctcttgcgggtattgctcaaatgcggcgcgtacagaagccagatcattataagtacaggttaaggtatatttggcgaaatctgccggaacgcccggcgagtttggctggcctaacgtgagtgcgccagaaccggctttcaccagcaggcagtcagcgtgaccatggtaacacccttcaaatttaataattttgtcgcgaccggtaaaaccacgggccaggcggatggcgctcatggtcgcttcagtgccggagttcaccatgcgcaccatatccatggtcgggaccagttcggtcaccagttgcgccattttcacttccatttcggttggtgcaccaaagcttaaaccacgctcggcggcttcaatcacggcattgcggattgccggatggttatggcccagcaccatcggcccccaggaaccgacataatcgatataggctttgccatcaacatcgtacagataagcgccgtccgctttttcgataaacagtggagtgccgcccacgccagtaaaggcgcgaacaggggagttcacaccgccagggatcagctcgcgcgctgcgctgtaaagattttcagacttactcatggagggttcctgattcgtagaaaaagtgaatggctgctattctatgttattcataacaagttaaatactcgtcaaacatcaggctgcttgtactggtgcaatcctgatttcttagagtataaaagttttgtgcatttgaaacattacgctttgcaaaggattttcatggaacgtgcgagtaaaatgccgtcatcttatttgtatgaccaataagtgatcattggatgaaaactgatactccctctttagaaacaccgcaggccgcgcgcctgcgacgcagacaactgattcgccaacttcttgagcgcgataaaaccccgttagccattttgtttatggcggcagtcgtcggcacgcttgttgggctggcagcggttgcttttgacaaaggtgtcgcctggttgcagaaccaacgtatgggggcgctggtacatactgctgataattatccgcttctgttaaccgtcgcttttctctgttcggcggtgctggcgatgtttggctactttttggtgcgcaaatacgcgccggaagcaggtggttcggggatcccggaaattgaaggggcgctggaagatcaacgtcccgttcgctggtggcgtgtattgccggtgaagttctttggcgggctggggacactcggcggaggcatggtgttggggcgcgaagggccaaccgtgcagatcggcggtaacattggccgtatggtgcttgatattttccgcctgaaaggtgacgaagctcgccatacgctgctggcaaccggtgctgctgcggggctggctgcggcctttaacgcgccgctggcgggtattttgtttattatcgaagagatgcgtccgcagtttcgctatacgttaatttcgattaaagcggtatttattggtgtcattatgtcgaccattatgtaccggatttttaatcatgaagttgcgttgattgacgtcggtaaactttctgatgcgccgcttaatacgctgtggctttatctgatcctcggtattatttttggcattttcggccctatttttaataaatgggtgctggggatgcaggatttgctgcaccgtgtgcacggcggcaatattaccaaatgggtgctaatgggcggtgcgattggcggtctgtgtggattgctggggtttgtggcaccagcaacgtcgggcggcggttttaacctgattcctatcgctaccgcggggaatttcagcatgggaatgctggtgtttatcttcgtcgcgcgggtcattaccaccttactctgcttctcttccggcgcgccgggcggtatttttgccccgatgctggcgctgggtactgtgctgggaaccgctttcggaatggttgccgttgagctgtttccgcaatatcaccttgaggcggggacgtttgctattgccggaatgggggcattactggcggcatctattcgcgcgccgttaacggggatcattctggttctggagatgaccgataactaccagctcattttgccaatgattattaccggtcttggcgcaacactattagcgcaatttaccggcgggaaaccgctatactcggcgattcttgcgcgcacgctggcaaaacaggaagctgagcaactggcgcgaagcaaggccgcatcagccagcgagaatacttgaacgaaataccagggtattagataatggcgattattattgggttagaatttgcccaattgccgatgtcgtttggagcaaaatatgagtgatgacgtagcactgccgctggagtttaccgacgcagcagccaacaaagttaaaagcctgatcgctgacgaagataacccgaatctgaaattacgcgtgtatatcaccggtggcggttgcagcggcttccagtatggtttcacctttgatgatcaggtgaacgaaggcgatatgaccatcgaaaaacagggcgttggcctggtggttgatccgatgagcctgcaatatctggtcggcggttccgttgattataccgaaggtctggaaggttctcgtttcatcgtgaccaacccgaacgcgaaaagcacctgcggttgcggttcttcctttagtatctaatctgttgttcatgtgccggataaactatccggcacatcttctctcttcaacgcccattctcatccagcgcaaacgtcggtagcttaagatgccaacgaatagccgccagccgaatcaatagcgtcacgaccatgcccatcatactggctgtttccagtggtacggaaaatgtgtaataagccgtagcgtggacaataccgccgataatacaggcagttgcgtagatttctgtacgtaaaatcatggggatttcgcgggccagaacatcacgaatgatcccgccgccaacgccagtaatgacgcccatacaaaccgcgattaacggaccggcttccgcattaaaggctttattcacgccaatgccgacaaacaccgccagaccaacggcgtccagcaccggcaacatccattttggtaagcgtcttggctggcgcaccagcacgatggtcagcatgctggtgaccattgcaacgaccagatcggtgggatctttcacccaaaataccgggccgtgatccagcgccatgtcgcgaattgtcccgccgcctactgcggttaccacgcccagtaccagaacaccaaaagggtccatacgcaattttccggctaacaaaacgccggagatggcaaataccgctgtgccgactatatccagccaatagacgagcattgttcaatccccactgagcacctgaaaaggtcaggcgctaatctacctgtgaaagcgcattacagagctgttgtgcagcgaggataatacgtgggcttgcacgttcaaaccagtcactcgtgagaggaataacgggaattttgagctgttcaccccagtattgtttgattttaggaatttggtccggtccgcctgtaatgacaatcgcctgtggcgagcgtgctaacacctgttcgcggctaacttgcggccagggaacccggctgtctttaaagatgttttctccgccacaaacttcgagtacctggttctgaatcgactcttttccactggtaaatggcggattaatgccgaattgcagaaaaacacgttttttaggtttatcagcatattgcgctttcaattgcgcgtactgatccagcagggattgcgcggcttgttcggccttgtctggttgcggactccagggggccagttgacgtaacgcattggcaatttgttcaatgcttgtcgcatcgacccacatcacttttattcccagcgaagccagctggtcaacctgccgctcggcattacctccacgccaggcaatcaccagatcgggtttcagcgcgacaatgcgttccagattcatcccctgccaggtggaaacctgctcaatcttttgcgcttgtggaggatagtcggaatagctgctgaccccaaccggcgtgatcccggcggcaaaggcaagttcagtgttggcgggagaaagcgtgatgacgcgcggcgcggcgttgagccacagtggcgcaagaaaagacagggcgaccagcgccctgaacagtgacttagccatgtgcaagtttctgcaccagtgactcaaccatcaggctggactgtttagcggcaacagccaggaactcatcgaagctaagatgagactgttgatcggccacgtcggagatggcgcgtacgacaacaaacgggacgttgaaattgtggcagacatgggcgattgccgtcgcttccatctctacagcaatggcctgtgggaagttgtggcggattttcgccagaccaacagaaccgttgatgaaagcgtcgccgctaacaatcaggccacgtacagcgttaagattcagttcggcaatgcaggcctcagcggcagcgatcagtttatcgtcagctttaaagcctgccggacagcctggtaactgaccgtattcataaccaaatgccgtgacatccgcgtcgtgataacgtgcttcgtccgagacaacgatatcgcccactttcaacgttggtgccaggccaccggcagaaccggtgttaataatcacatctggcttgcagtgttccaacagcaaagtggcacccagcgccgcagcgactttaccgatgcccgatttcagaagcgcaacctcggttccattcagttggccggtatagatttcgcaaccgccgagactgatagtttgacggttttcgattttgtcacgcagcagcgtaacttcttcttccattgcaccaatgatgccgattttcatagatttactcgcgataagcccgatttgaaggcatagtttaccatgcgcttacggggaagcgtatttctcacgcgggagaggacatggcacagattgatttccgaaaaaaaataaactggcatcgtcgttaccgttcaccgcagggcgttaaaaccgaacatgagatcctgcggatcttcgagagcgatcgcgggcgtatcatcaactctccggcaattcgtcgtctgcaacaaaagacccaggtttttccactggagcgcaatgccgccgtgcgcacgcgtcttacccactcgatggaagtccagcaggtggggcgctacatcgccaaagaaattttaagccgtctgaaagagcttaaattactggaagcatacggcctggatgaactgaccggtccctttgaaagcattgttgagatgtcatgcctgatgcacgatatcggcaatccgccgtttggtcattttggcgaagcggcgataaatgactggtttcgccaacgtttgcacccggaagatgccgaaagccagcctctgactgacgatcgctgcagcgtggcggcactacgtttacgggacggggaagaaccgcttaacgagctgcggcgcaagattcgtcaggacttatgtcattttgaggggaatgcacaaggcattcgcctggtgcatacattgatgcggatgaatctcacctgggcacaggttggcggtattttaaaatatacccgtccggcgtggtggcgtggcgaaacgcctgagacacatcactatttaatgaaaaagccgggttattatctttctgaagaagcctatattgcccggttgcgtaaagaacttaatttggcgctttacagtcgttttccattaacgtggattatggaagctgccgacgacatctcctattgtgtggcagaccttgaagatgcggtagagaaaagaatatttaccgttgagcagctttatcatcatttgcacgaagcgtggggccagcatgagaaaggttcgctcttttcgctggtggttgaaaatgcctgggaaaaatcacgctcaaatagtttaagccgcagtacggaagatcagttttttatgtatttacgggtaaacaccctaaataaactggtaccctacgcggcacaacgatttattgataatctgcctgcgattttcgccggaacgtttaatcatgcattattggaagatgccagcgaatgcagcgatcttcttaagctatataaaaatgtcgctgtaaaacatgtgtttagccatccagatgtcgagcggcttgaattgcagggctatcgggtcattagcggattattagagatttatcgtcctttattaagcctgtcgttatcagactttactgaactggtagaaaaagaacgggtgaaacgtttccctattgaatcgcgcttattccacaaactctcgacgcgccatcggctggcctatgtcgaggctgtcagtaaattaccgtcagattctcctgagtttccgctatgggaatattattaccgttgccgcctgctgcaggattatatcagcggtatgaccgacctctatgcgtgggatgaataccgacgtctgatggccgtagaacaataaccaggcttttgtaaagacgaacaataaatttttaccttttgcagaaactttagttcggaacttcaggctataaaacgaatctgaagaacacagcaattttgcgttatctgttaatcgagactgaaatacatgaaaaaaaccacattagcactgagtgcactggctctgagtttaggtttggcgttatctccgctctctgcaacggcggctgagacttcttcagcaacgacagcccagcagatgccaagccttgcaccgatgctcgaaaaggtgatgccttcagtggtcagcattaacgtagaaggtagcacaaccgttaatacgccgcgtatgccgcgtaatttccagcagttcttcggtgatgattctccgttctgccaggaaggttctccgttccagagctctccgttctgccagggtggccagggcggtaatggtggcggccagcaacagaaattcatggcgctgggttccggcgtcatcattgatgccgataaaggctatgtcgtcaccaacaaccacgttgttgataacgcgacggtcattaaagttcaactgagcgatggccgtaagttcgacgcgaagatggttggcaaagatccgcgctctgatatcgcgctgatccaaatccagaacccgaaaaacctgaccgcaattaagatggcggattctgatgcactgcgcgtgggtgattacaccgtagcgattggtaacccgtttggtctgggcgagacggtaacttccgggattgtctctgcgctggggcgtagcggcctgaatgccgaaaactacgaaaacttcatccagaccgatgcagcgatcaaccgtggtaactccggtggtgcgctggttaacctgaacggcgaactgatcggtatcaacaccgcgatcctcgcaccggacggcggcaacatcggtatcggttttgctatcccgagtaacatggtgaaaaacctgacctcgcagatggtggaatacggccaggtgaaacgcggtgagctgggtattatggggactgagctgaactccgaactggcgaaagcgatgaaagttgacgcccagcgcggtgctttcgtaagccaggttctgcctaattcctccgctgcaaaagcgggcattaaagcgggtgatgtgatcacctcactgaacggtaagccgatcagcagctttgccgcactgcgtgctcaggtgggtactatgccggtaggcagcaaactgaccctgggcttactgcgcgacggtaagcaggttaacgtgaacctggaactgcagcagagcagccagaatcaggttgattccagctccatcttcaacggcattgaaggcgctgagatgagcaacaaaggcaaagatcagggcgtggtagtgaacaacgtgaaaacgggcactccggctgcgcagatcggcctgaagaaaggtgatgtgattattggcgcgaaccagcaggcagtgaaaaacatcgctgaactgcgtaaagttctcgacagcaaaccgtctgtgctggcactcaacattcagcgcggcgacagcaccatctacctgttaatgcagtaatctccctcaaccccttcctgaaaacgggaaggggttctccttacaatctgtgaacttcaccacaactccatacatcttcatcatcctttaggcatttgcacaatgccgtacgttacgtacttccttatgctaagccgtgcataacggaggacttatggctggctggcatcttgataccaaaatggcgcaggatatcgtggcacgtaccatgcgcatcatcgataccaatatcaacgtaatggatgcccgtgggcgaattatcggcagcggcgatcgtgagcgtattggtgaattgcacgaaggtgcattgctggtactttcacagggacgagtcgtcgatatcgatgacgcggtagcacgtcatctgcacggtgtgcggcaggggattaatctaccgttacggctggaaggtgaaattgtcggcgtaattggcctgacaggtgaaccagagaatctgcgtaaatatggcgaactggtctgcatgacggctgaaatgatgctggaacagtcgcggttgatgcacttgttggcgcaggatagccgtttgcgggaagaactggtgatgaacctgattcaggcagaggagaatactcccgcacttactgaatgggcgcaacggctggggatcgatctcaatcaaccgcgagtggtggctattgttgaggtcgacagcggtcagcttggcgtggacagcgcaatggcggagttacaacaactgcaaaacgcgctgactacgcccgagcgtaataatctggtggcgattgtctcgctaaccgaaatggtggtgttgaaaccggcgttgaactcttttgggcgctgggatgcagaagatcatcgtaagcgagttgaacaactgattacccgcatgaaagagtacggccagctgcgttttcgcgtttcactgggcaactattttaccggtcctggcagtattgcccgatcctatcgtacggcgaaaacgacgatggtggtgggtaaacagcggatgccagaaagtcgctgctatttttatcaggatctgatgttacctgtgttactcgacagtttgcgtggcgactggcaggccaacgaactggcgcgaccgctggcgcggctgaaaacgatggacaataacggcttgctgcgacgaacgctggcggcgtggtttcgccacaatgtgcaaccgctggcaacgtcaaaggcgttgtttattcatcgtaataccctggagtatcggcttaatcgtatatcggaactgaccgggcttgatttgggcaattttgatgacaggttgctgctgtatgtggcgttacaactggatgaagagcggtaggttatgcgttaaggttgaggcggcgctggctcattcccctcagcccgaagggtagaggggaatgcccgaattaaccgtcagttcgggattatttacgcgttagtttttccagatcggcttcaatctcgctgatcttattggttacgactgactccaggtgacgtaagtcgtcgaggatcttacgcttaagatcaacttcgctgcggtcacgctggcagatttgatcaagctcatcaatgatataccgtagattcgggctgatttcctggacttctttataaccctgacccacaccatcagcgacgaccgttttacgctgacgcggatatttaaacttaacgctcttggcgaaaaactcgcctttgtctttctggaaatagattttcagaatatcgttgttggcttcctgccggaggctgtaacgatcaatttcttcaggattggtaatacccagacttttcagattgtcgtacatagcgttacctcaaaatgagtcagtaaattgtgcttattttagcatttggcctggcccgcccggctcgactgtgatcgcagaaagcctttttcttccagacttctatcatggcgtaaaaatcaaaaaattacctgctttattctggtgataaaattcacgatctacaccagttccagcatcgttacttccgggcggcagttcagacgcaaaccatacaaactgcccacgccacgggttgtgtagatgtgtctttcgccaaaggcatttaatccggcgacgtaacgtttatcttcgacaggggcaaaaggttcaccaaccaacggtacgcgcagttgcccgccgtgagtatggccgcacagcatcagatcccagggttcatcacgcatgacttctttgctgtcgggattatgcgccagcaccagtcttggcagattggcttcgctggcgggaggcggtttgcattgtccggcccataagtcaccagtgcctaccagttcgaattgcctgttcggcgtggcgatcaccgtagcctggttaaacaacaccgtgatgcccgctgatttcaacgtctcgccaattaagtgatttttttctgtaccaacagggcgatcgtggttgccgaagcaggcaaacgtcggcgcacattcggcaaggggggagagtacgtcactaaacgccgaaaaattcagcgacatatcaaataatacgtaatcgccgcccagtaatatcaaatcgggcttttgttctatgccaagagcaatcgcgtcagaaatcaggcttaaaggaacaaaacgagagtaatggagatcggccagaaaaagaattttgaatggtgctgcgttgtctttaaaaaaggcgaggcggtgacggattaattcaaaccagcctggctcacagtaatgcatataaccgaaacctgagctcgtggctatcgtcgcggcagtagcctgcaaaaatcggcggcgtgaaatcatcgctcatccctgcaaaaaaatcgggcagcgtcgtgctgcccgtgtgcatacttttagtcgatggtacgcagcagttcgttaatgccgactttgccgcgagttttcgcgtcaactttcttaacgataaccgcacagtagaggctgtatttgccatcttttgacggcagattacctgaaacaaccacagaccccgccggaacgcgaccgtagtggatttcgccggtttcacggtcgtaaatacgggtgctctgaccaatgtatacgcccatggaaatgacggaaccttcttcgacaatcaccccttcaaccacttcagagcgcgcgccgatgaagcaattatcttcaatgatggttgggttagcctgcagcggttccagcacgccgccgatgcccacgccaccggaaaggtggacgtttttaccaatctgcgcacaagaaccgacggtcgcccaggtatcaaccatggtgccttcatcaacatatgcgccgatgttgacgtaagacggcatcagcacggtgttacgggcaataaacgcaccctgacgtaccgccgctggtggcacaacgcggaagccttctttctggaaacgtgcttcgtcgtagtcggcgaatttcatcggcactttgtcgaagtagcggctttctgccccttcgatcacctgattatcattaatacggaaagagagcagcaccgcttttttcaaccactgatgcgtcacccactgaccgtcaattttttccgctacacgcagtgcgccggaatccagcagggcgatcacctgatttaccgcttcgcgggtaacggtgtctgcattggctggcgtgatctcggcacggcgttcaaaagcggtttcaataatgttctgtaactgctgcattgttaaactcttttcatatcagtaaacacatcaccctttatcgtttggattgagggcctctgtcaaccgctgatgcacttcctgctgcaactcgttattaagcgcacgccggtcagcggtggcaattatgaataaatcttctactcgctcgccaatggttgtaattcgggcaccatgaagcgaaattcccagatcggcaaaaattttcccgactcgcgccagcagtccaggttggtcgagggcgatcagttcgaggaacgatttgcggtcggtatgggtcggcaaaaacgttacttcggtttcaacagtaaaatggcgtaatttggcgggttggcgacggggctgcggtggctgccagctactttgcgtcagtacttgctccagaccaaaccgaataacctcatgacgatctgcggacagcgggttgccatcgggttccagcacgataaaggtatccatcgccataccgtcgcgagtggtgaaaatttgtgcgtcgtgaacacttaaattgcggcggtctaattcggcacagacggcggcaaacagataagggcggtccgggctccagataaaaatctcggtgcctccacgcgtagcctgcgggctaagcaataccagcggtttgcttaaatcatgctgtaataaatggcgggcatgccaggccagttgatttgggctatggcggacaaaatagttagcacgacagcgtgaccaaatttggtgcagcgcctcttcgtcgatgttatccatgcgcagtagtgccagtgcctggagttggtgatggcgaacccgttcgcgcatatccggcgtgttttgcattccgcgtcgtagctgcttttcggtggcaaagtagagctcacgcaacagactttgcttccagctattccacagcgtttcgttggtggcgcaaatgtcagccacagtcaggcataccagatagcgcagacgattttccgtttgcacttcttcggcaaactgcttgatgacttccgggtcctgaatatcgcggcgttgggcggtcaccgacatcaacaggtgctggcgaaccagccaggcgaccagctgtgtttcgcgtgagttcagcccgtggagttcggcaaaatgcactacatcctgagcaccgagaatggagtggtcgccgccgcgtcctttggcgatatcgtgaaacagcgcggcgatgaaaatcagctcagttgacggcaggcgcggccagacgtccacacacaacggatggcgctggcgcgtttcttcactggcaaaactctccagtttcagcatcacgcggatagtatgttcatccaccgtgtaggcgtggaacagatcaaactgcatctgcccgacgatatgcgaccattgcggcatatacgcgccgagcacgctatggcgatgcattggcaatagcccgcgccgcaccgctccggggtgacgcagaatgctcaaaaacagttttcgtgcttccggaatattacacagcggttgttgcagatggcgacgggcatggcgtaactggcgcagcgtggtggagtaaatgccggtgatcgcactgttgtgcaccatggtgtagaacatacgcaagatggcttccggctggcgcataaatagtgtttcatcacgcaggtcgattagcgtaccgcgtagctgaaactcatcgtcgattggacgtggtttttcgtcggcgggaagggcgaggatggcttcatcgaacagttgcagcagcatctggttgagttcactgacgcggcgtgtaacgcggaagtaatccttcatcatccgctcgaccggttcgttaccttcaccactgtaattcagacgctgggcgacgctaagctggcgatcgaataacaggcgattatcgtaacggctgacgaccagatgcagggcaaagcgaatacgccacaatatatgcagacattcgtttaattccgcccgctccgctgaggttaagaagccaaacccgaccatttcatccagcgatgttgcgccaaaatgacggcgggccacccattgcagagtgtggatatcgcgcaagccgccagggctgcttttgatgtctggttcaaggttgtagctggtgccatggtaacgctgatggcgctggttctgttcttcaactttcgccgcgtagaacttgtcggaaggccagaatccttcgctgaaaatatgtttttgcagttcgaggaacagcgcaacatcgccaattaataagcgggattcgattaaattggtggcgacggttaaatccgataacccttccagcatgcactcttcaagcgtgcgcacgctatgaccgacttccagctttacatcccagagcagcgttaacagctcgcccactttttgcgcctgatcgtccgggagctttttacggcttaaaatcagtaaatcgacgtctgaaagtggatgcagctcgccacgaccgtagccaccgacggcgaccaatgccaggtcggcaatctggctgaatcccgcttcaatccataatcgttgcaggagctggtcgataaactcggtgcgcgcctcaatcaactgttctgcagagatcccattgtcaaaggcatcacccagccaacgctggaaagtatcgatatgggcttttatcccaccgacggttaattcatcacggggccagacgcatggattttgcggttgaccgggcagggtggggagagcggtgtttgcgtactgttctggaagggtattcattgtgcgccacccataagattaaattatcgcattaaaaaagccggcattcgccggcttcatcttattcgtcgtgcgagattatcgccgggatggtgtcatccttgcgtagcgtcagaatttcgcagccgttatcagtcaccacaatagtatgctcatattgtgcagacaagctgcgatctttggtttttaccgtccagccatctttcatggtgcggatctcttttttacccgcgttgaccattggctcgatggtgaacgtcatcccaggtttcagtacgacgttggtttcacgggagtcatagtgcagcacctgcggttcttcatggaagccgcgaccaataccgtgtccgcaatattcacgaacgacggagaagccttctgcttcgacaaatttctgaatcgccgcaccgatttcgcgcagattaatgcctggttttaccatgcgtagcgccaggtacaggctttcttgcgtgatgcggcacagacgttcgcccatgatggtcggcttaccgacgataaacattttcgaggtatcgccgtggaaaccatctttgattacggtgacatcaatgttaacgatatcgccatctttcagcagcttagcatcgtccgggataccgtggcacaccacttcattaatagagatgcaaacggatttcggatagccgtgatagccgaggcaggcagaaaccgcgtgttgttcattaacaatgtaatcattacagatgcgatccagctcgccggtgctgacgcccggtttaacatacggttcgatcatctccagcacttcggcagccagtcggccagcgacgcgcattttttcgatatcttctggggtcttgattgagatagccattaattctgtccatcagcgtcggtgataccgacaatatatatgtaagtgccgtcaatggtatcacacccgggcaaattgagaatcattctgaatttcgccaaacgtgccactgaaggttttctataatagaaaattcgacgtctgatgctgtacacagcgccaacaattattggtgtccacgacgtatttgtggtataaagcgcgccggacttccgatccatttcgtatacacagactggacggaagcgacaatctcactttgtgtaacaacacacacgtatcggcacatattccggggtgccctttggggtcggtaatatgggatacgtggaggcataaccccaacttttatatagaggttttaatcatggcaactgtttccatgcgcgacatgctcaaggctggtgttcacttcggtcaccagacccgttactggaacccgaaaatgaagccgttcatcttcggtgcgcgtaacaaagttcacatcatcaaccttgagaaaactgtaccgatgttcaacgaagctctggctgaactgaacaagattgcttctcgcaaaggtaaaatccttttcgttggtactaaacgcgctgcaagcgaagcggtgaaagacgctgctctgagctgcgaccagttcttcgtgaaccatcgctggctgggcggtatgctgactaactggaaaaccgttcgtcagtccatcaaacgtctgaaagacctggaaactcagtctcaggacggtactttcgacaagctgaccaagaaagaagcgctgatgcgcactcgtgagctggagaaactggaaaacagcctgggcggtatcaaagacatgggcggtctgccggacgctctgtttgtaatcgatgctgaccacgaacacattgctatcaaagaagcaaacaacctgggtattccggtatttgctatcgttgataccaactctgatccggacggtgttgacttcgttatcccgggtaacgacgacgcaatccgtgctgtgaccctgtacctgggcgctgttgctgcaaccgtacgtgaaggccgttctcaggatctggcttcccaggcggaagaaagcttcgtagaagctgagtaataaggcttgataactcccccaaaatagttcgagttgcagaaaggcggcaagctcgagaattcccgggagcttacatcagtaagtgaccgggatgagcgagcgaagataacgcatctgcggcgcgaaatatgaagggggagagcccttatagaccaggtagtacacgtttggttagggggcctgcatatggccccctttttcacttttatatctgtgcggtttaatgccgggcagatcacatctccgaggattttagaatggctgaaattaccgcatccctggtaaaagagctgcgtgagcgtactggcgcaggcatgatggattgcaaaaaagcactgactgaagctaacggcgacatcgagctggcaatcgaaaacatgcgtaagtccggtgctattaaagcagcgaaaaaagcaggcaacgttgctgctgacggcgtgatcaaaaccaaaatcgacggcaactacggcatcattctggaagttaactgccagactgacttcgttgcaaaagacgctggtttccaggcgttcgcagacaaagttctggacgcagctgttgctggcaaaatcactgacgttgaagttctgaaagcacagttcgaagaagaacgtgttgcgctggtagcgaaaattggtgaaaacatcaacattcgccgcgttgctgcgctggaaggcgacgttctgggttcttatcagcacggtgcgcgtatcggcgttctggttgctgctaaaggcgctgacgaagagctggttaaacacatcgctatgcacgttgctgcaagcaagccagaattcatcaaaccggaagacgtatccgctgaagtggtagaaaaagaataccaggtacagctggatatcgcgatgcagtctggtaagccgaaagaaatcgcagagaaaatggttgaaggccgcatgaagaaattcaccggcgaagtttctctgaccggtcagccgttcgttatggaaccaagcaaaactgttggtcagctgctgaaagagcataacgctgaagtgactggcttcatccgcttcgaagtgggtgaaggcatcgagaaagttgagactgactttgcagcagaagttgctgcgatgtccaagcagtcttaattatcaaaaaggagccgcctgagggcggcttctttttgtgcccatcttgtaaattcagctaacccttgtggggctgcgctgaaaagcgacgtacaatgtcgctagtattaattcatttcaatcgttgacagtctcaggaaagaaacatggctaccaatgcaaaacccgtctataaacgcattctgcttaagttgagtggcgaagctctgcagggcactgaaggcttcggtattgatgcaagcatactggatcgtatggctcaggaaatcaaagaactggttgaactgggtattcaggttggtgtggtgattggtgggggtaacctgttccgtggcgctggtctggcgaaagcgggtatgaaccgcgttgtgggcgaccacatggggatgctggcgaccgtaatgaacggcctggcaatgcgtgatgcactgcaccgcgcctatgtgaacgctcgtctgatgtccgctattccattgaatggcgtgtgcgacagctacagctgggcagaagctatcagcctgttgcgcaacaaccgtgtggtgatcctctccgccggtacaggtaacccgttctttaccaccgactcagcagcttgcctgcgtggtatcgaaattgaagccgatgtggtgctgaaagcaaccaaagttgacggcgtgtttaccgctgatccggcgaaagatccaaccgcaaccatgtacgagcaactgacttacagcgaagtgctggaaaaagagctgaaagtcatggacctggcggccttcacgctggctcgtgaccataaattaccgattcgtgttttcaatatgaacaaaccgggtgcgctgcgccgtgtggtaatgggtgaaaaagaagggactttaatcacggaataattcccgtgatggataaataagggtaagattccgcgtaagtatcgcgggggcgtaagtctggttataaggcgttattgttgcaggcagtttggtcacggccagcgcgcagcaaccggagcgtacaaaagtacgtgaggatggcgagcactgcccggggccaaaatggcaaataaaatagcctaataatccagacgattacccgtaatatgtttaatcagggctatacttagcacacttccactgtgtgtgactgtctggtctgactgagacaagttttcaaggattcgtaacgtgattagcgatatcagaaaagatgctgaagtacgcatggacaaatgcgtagaagcgttcaaaacccaaatcagcaaaatacgcacgggtcgtgcttctcccagcctgctggatggcattgtcgtggaatattacggcacgccgacgccgctgcgtcagctggcaagcgtaacggtagaagattcccgtacactgaaaatcaacgtgtttgatcgttcaatgtctccggccgttgaaaaagcgattatggcgtccgatcttggcctgaacccgaactctgcgggtagcgacatccgtgttccgctgccgccgctgacggaagaacgtcgtaaagatctgaccaaaatcgttcgtggtgaagcagaacaagcgcgtgttgcagtacgtaacgtgcgtcgtgacgcgaacgacaaagtgaaagcactgttgaaagataaagagatcagcgaagacgacgatcgccgttctcaggacgatgtacagaaactgactgatgctgcaatcaagaaaattgaagcggcgctggcagacaaagaagcagaactgatgcagttctgatttcttgaacgacaaaaacgccgctcagtagatccttgcggatcggctggcggcgttttgctttttattctgtctcaactctggatgtttcatgaagcaactcaccattctgggctcgaccggctcgattggttgcagcacgctggacgtggtgcgccataatcccgaacacttccgcgtagttgcgctggtggcaggcaaaaatgtcactcgcatggtagaacagtgcctggaattctctccccgctatgccgtaatggacgatgaagcgagtgcgaaacttcttaaaacgatgctacagcaacagggtagccgcaccgaagtcttaagtgggcaacaagccgcttgcgatatggcagcgcttgaggatgttgatcaggtgatggcagccattgttggcgctgctgggctgttacctacgcttgctgcgatccgcgcgggtaaaaccattttgctggccaataaagaatcactggttacctgcggacgtctgtttatggacgccgtaaagcagagcaaagcgcaattgttaccggtcgatagcgaacataacgccatttttcagagtttaccgcaacctatccagcataatctgggatacgctgaccttgagcaaaatggcgtggtgtccattttacttaccgggtctggtggccctttccgtgagacgccattgcgcgatttggcaacaatgacgccggatcaagcctgccgtcatccgaactggtcgatggggcgtaaaatttctgtcgattcggctaccatgatgaacaaaggtctggaatacattgaagcgcgttggctgtttaacgccagcgccagccagatggaagtgctgattcacccgcagtcagtgattcactcaatggtgcgctatcaggacggcagtgttctggcgcagctgggggaaccggatatgcgtacgccaattgcccacaccatggcatggccgaatcgcgtgaactctggcgtgaagccgctcgatttttgcaaactaagtgcgttgacatttgccgcaccggattatgatcgttatccatgcctgaaactggcgatggaggcgttcgaacaaggccaggcagcgacgacagcattgaatgccgcaaacgaaatcaccgttgctgcttttcttgcgcaacaaatccgctttacggatatcgctgcgttgaatttatccgtactggaaaaaatggatatgcgcgaaccacaatgtgtggacgatgtgttatctgttgatgcgaacgcgcgtgaagtcgccagaaaagaggtgatgcgtctcgcaagctgaggataatccggctacagagagtcgcgctatttgttagcgtagggcttcagtgatatagtctgcgccatctgatcgtaagtagttggctttataaggtcagatatgccgtggttttacacggcttttttttgtataggcttcagtattcctgagtaccgtaaaccctgtcagggaataaaaaacgcgtgatgttgtctgctactcaaccacttagcgaaaaattgccagcgcatggctgccgtcatgttgcgatcattatggacggcaatggccgctgggcaaaaaagcaagggaagattcgtgcctttgggcataaagccggggcaaaatccgtccgccgggctgtctcttttgcggccaacaacggtattgaggcgttaacgctgtatgcctttagtagtgaaaactggaaccgaccagcgcaggaagtcagtgcgttaatggaactgtttgtgtgggcgctcgatagcgaagtaaaaagtctgcaccgacataacgtgcgtctgcgtattattggcgataccagtcgctttaactcgcgtttgcaagaacgtattcgtaaatctgaagcgctaacagccgggaataccggtctgacgctgaatattgcggcgaactacggtggacgttgggatatagtccagggagtcaggcaactggctgaaaaggtgcagcaaggaaacctgcaaccagatcagatagatgaagagatgctaaaccagcatgtctgtatgcatgaactggcccctgtagatttagtaattaggactgggggggagcatcgcattagtaactttttgctttggcaaattgcctatgccgaactttactttacagatgttctctggcccgatttcgatgaacaagactttgaaggggcgttaaatgcctttgctaatcgagagcgtcgtttcggcggcaccgagcccggtgatgaaacagcctgatgggggtcgcttttgctgaagtatcgcctgatatctgcttttgtgttaatacccgtcgtcatcgcggcgttgtttctgttgccgccggtggggttcgccattgtaacgctggtggtctgcatgctggcagcgtgggaatggggacagcttagcggttttaccactcgttcgcagcgagtatggttggcggtgttatgcgggttattgttggcgctgatgctttttctgttgccggaatatcaccgaaatattcatcaaccgctggttgaaatctcactttgggcttcgctgggttggtggattgtcgcgctattgctggtgctgttttacccaggttccgcagcaatctggcgtaactctaaaacattgcgccttatttttggcgtgctaaccattgttcccttcttctggggcatgctggcgttacgggcctggcactatgacgagaatcattacagtggcgcaatatggctgctctatgtcatgatcctggtatggggcgctgactccggcgcatatatgtttggcaaattgtttggtaaacataagctggcaccgaaggtttctccgggtaaaacctggcaaggctttatcggtggactcgctactgcagcggtaatctcatggggttatggcatgtgggcgaatctcgacgtcgctcccgtcaccttactcatttgctctattgtcgcagcgttagcctcagtgctcggcgatctgaccgagagtatgtttaagcgtgaagcaggaattaaggacagcggtcatttaattccaggacacggtggtattttagatcgtattgatagcctgacggctgcggtaccggtctttgcttgcttgttgttactggtattcaggacgctttaacggaaggtaatatgctgagttttctctgggatttggcttcgttcatcgttgcactgggtgtacttatcaccgtgcatgaatttggtcatttctgggttgcccggcgttgtggtgttcgcgttgagcgtttctcaatagggtttggtaaggcgctctggcggcgaactgataagctcggcaccgaatatgttatcgccctgatcccgttgggcggttatgtcaaaatgctggatgagcgcgcagaaccggtcgttccggaactccgccaccatgccttcaataataaatctgtcggccaacgagcggcgattattgccgcaggtccggttgcaaacttcatttttgctatctttgcctactggctggtttttattattggtgtgcctggcgtacgtccggtggttggcgaaatagcagccaattcgatagctgcggaagcacaaattgcaccaggtacggaactaaaagccgtagatggtatcgaaacgcctgattgggatgccgtgcgtttgcagttggtcgataaaattggcgatgaaagcaccaccattacagtagcgccatttggcagcgaccaacggcgggatgtaaagctcgatttacgtcactgggcgtttgagcctgataaagaagatccggtatcttcgctggggattcgtcctcgtgggccgcaaattgaacctgtactggaaaatgtgcagccaaactcggcggcaagcaaggcaggtttgcaagcaggcgacaggatcgttaaagtcgatggtcagcccttaacgcagtgggtgacctttgtgatgcttgtccgggataacccgggtaaatccttagcgttagaaatcgaaaggcaggggagtcccttgtctttgacattaatcccggagagtaaaccgggtaatggtaaagcgattggttttgtcggtattgagccgaaagtcattcctttgccagatgagtataaagttgtacgccagtatgggccgttcaacgccatcgtcgaagccacggacaaaacgtggcagctgatgaagctgacggtcagtatgctgggaaaattgatcaccggtgatgtgaaactgaacaacctcagtgggccgatctctatcgccaagggggctgggatgacagcggaactcggggttgtttattacctgccgtttcttgcgcttattagcgtgaacttagggataattaacctgtttccgttgcccgtacttgacggggggcatctgctgttccttgcgatcgaaaagatcaagggcggaccggtatccgagcgggttcaagacttttgttatcgcattggctcgattctgctggtgctgttaatggggcttgcacttttcaatgatttctctcggttatgagagttagttaggaagaacgcataataacgatggcgatgaaaaagttgctcatagcgtcgctgctgtttagcagcgccaccgtatacggtgctgaagggttcgtagtgaaagatattcatttcgaaggccttcagcgtgtcgccgttggtgcggccctcctcagtatgccggtgcgcacaggcgacacggttaatgatgaagatatcagtaataccattcgcgctctgtttgctaccggcaactttgaggatgttcgcgtccttcgtgatggtgatacccttctggttcaggtaaaagaacgtccgaccattgccagcattactttctccggtaacaaatcggtgaaagatgacatgctgaagcaaaacctcgaggcttctggtgtgcgtgtgggcgaatccctcgatcgcaccaccattgccgatatcgagaaaggtctggaagacttctactacagcgtcggtaaatatagcgccagcgtaaaagctgtcgtgaccccgctgccgcgcaaccgtgttgacctaaaactggtgttccaggaaggtgtgtcagctgaaatccagcaaattaacattgttggtaaccatgctttcaccaccgacgaactgatctctcatttccaactgcgtgacgaagtgccgtggtggaacgtggtaggcgatcgtaaataccagaaacagaaactggcgggcgaccttgaaaccctgcgcagctactatctggatcgcggttatgcccgtttcaacatcgactctacccaggtcagtctgacgccagataaaaaaggtatttacgtcacggtgaacatcaccgaaggcgatcagtacaagctttctggcgttgaagtgagcggcaaccttgccgggcactccgctgaaattgagcagctgactaagatcgagccgggtgagctgtataacggcaccaaagtgaccaagatggaagatgacatcaaaaagcttctcggtcgctatggttatgcctatccgcgcgtacagtcgatgcccgaaattaacgatgccgacaaaaccgttaaattacgtgtgaacgttgatgcgggtaaccgtttctacgtgcgtaagatccgttttgaaggtaacgatacctcgaaagatgccgtcctgcgtcgcgaaatgcgtcagatggaaggtgcatggctggggagcgatctggtcgatcagggtaaggagcgtctgaatcgtctgggcttctttgaaactgtcgataccgatacccaacgtgttccgggtagcccggaccaggttgatgtcgtctacaaggtaaaagagcgcaacaccggtagcttcaactttggtattggttacggtactgaaagtggcgtgagcttccaggctggtgtgcagcaggataactggttaggtacaggttatgctgttggtatcaacgggaccaaaaacgattaccagacctatgctgaactgtcggtaaccaacccgtacttcaccgtagatggcgtaagcctcggtggtcgtctcttctataatgacttccaggcagatgacgccgacctgtccgactataccaacaagagttatggtacagacgtgacgttgggcttcccgattaacgaatataactcgctgcgtgcaggtctgggttatgtacataactccctgtccaacatgcagcctcaggttgcgatgtggcgttatctgtactctatgggtgaacatccgagcacctctgatcaggataacagcttcaaaacggacgacttcacgttcaactatggttggacctataacaagcttgaccgtggttacttcccgacagatggttcacgtgtcaacctgaccggtaaagtgaccattcctggatcggataacgaatactacaaagtgacgttagacacggcgacttatgtgccgatcgatgacgatcacaaatgggttgttctggggcgtacccgctggggttatggtgatggtttaggcggcaaagagatgccgttctacgagaacttctatgccggtggttccagcaccgtgcgtggcttccagtccaataccattggtccgaaagcagtttacttcccgcatcaggccagtaattatgatccggactatgattacgaatgtgcgactcaggacggcgcgaaagacctgtgtaaatcggatgatgctgtaggcggtaacgccatggcggttgccagcctcgagttcatcaccccgacgccgtttattagcgataagtatgctaactcggttcgtacttccttcttctgggatatgggtaccgtttgggatacaaactgggattccagccaatattctggatatccggactatagtgatccaagcaatatccgtatgtctgcgggtatcgcattacaatggatgtccccattggggccgttggtgttctcctacgcccagccgttcaaaaagtacgatggagacaaggcagaacagttccagtttaacatcggtaaaacctggtaagtgttctccacaaaggaatgtagtggtagtgtagcgatgactttaggcgatcaatataagatcgccgggccacgcaaagaactgcaccctccggtgcaaatgggatggtaaggagtttattgtgaaaaagtggttattagctgcaggtctcggtttagcactggcaacttctgctcaggcggctgacaaaattgcaatcgtcaacatgggcagcctgttccagcaggtagcgcagaaaaccggtgtttctaacacgctggaaaatgagttcaaaggccgtgccagcgaactgcagcgtatggaaaccgatctgcaggctaaaatgaaaaagctgcagtccatgaaagcgggcagcgatcgcactaagctggaaaaagacgtgatggctcagcgccagacttttgctcagaaagcgcaggcttttgagcaggatcgcgcacgtcgttccaacgaagaacgcggcaaactggttactcgtatccagactgctgtgaaatccgttgccaacagccaggatatcgatctggttgttgatgcaaacgccgttgcttacaacagcagcgatgtaaaagacatcactgccgacgtactgaaacaggttaaataagtaatgccttcaattcgactggctgatttagcgcagcagttggatgcagaactacacggtgatggcgatatcgtcatcaccggcgttgcgtccatgcaatctgcacaaacaggtcacattacgttcatggttaacccaaaataccgtgagcatttaggcttgtgccaggcgtccgcggttgtcatgacccaggacgatcttcctttcgcgaaaagtgccgcactggtagtgaagaatccctacctgacttacgcgcgcatggcgcaaattttagataccacgccgcagcccgcgcagaacattgcacccagtgcggtgatcgacgcgacggcgaagctgggtaacaacgtatcgattggcgctaacgcggtgattgagtccggcgttgaactgggcgataacgtgattatcggtgccggttgcttcgtaggtaaaaacagcaaaatcggtgcaggttcgcgtctctgggcgaacgtaaccatttaccatgagatccagatcggtcagaattgcctgatccagtccggaacagtggtaggcgcagacggctttggttatgccaacgatcgtggtaactgggtgaagatcccacagattggtcgcgtaattattggcgatcgcgtggagatcggtgcctgcacaaccatcgatcgcggcgcgctggatgacactattattggcaatggcgtgatcattgataaccagtgccagattgcacataacgtcgtgattggcgacaatacggcggttgccggtggcgtcattatggcgggcagcctgaaaattggtcgttactgcatgatcggcggagccagcgtaatcaacgggcatatggaaatatgcgacaaagtgacggttacgggcatgggtatggtgatgcgtcccatcactgaaccaggcgtctattcctcaggcattccgctgcaacccaacaaagtctggcgcaaaaccgctgcactggtgatgaacattgatgacatgagcaagcgtctgaaatcgcttgagcgcaaggttaatcaacaagactaacgttccatcttttgttcgccaaactttacggcctgtctcattcttacgattgcggcaggccgtgttattattgtcgtttcttatattttgacaggaagagtatcttgactactaacactcatactctgcagattgaagagattttagaacttctgccgcaccgtttcccgttcttactggtggatcgcgtgctggattttgaagaaggtcgttttctgcgcgcagtaaaaaatgtctctgtcaatgagccattcttccagggccatttccctggaaaaccgattttcccgggtgtgctgattctggaagcaatggcacaggcaacaggtattctggcgtttaaaagcgtaggaaaactggaaccgggtgagctgtactacttcgctggtattgacgaagcgcgcttcaagcgcccggtcgtgcctggcgatcaaatgatcatggaagtcactttcgaaaaaacgcgccgcggcctgacccgttttaaaggggttgctctggtcgatggtaaagtagtttgcgaagcaacgatgatgtgtgctcgtagccgggaggcctgatacgtgattgataaatccgcctttgtgcatccaaccgccattgtggaagagggcgcgtcaattggcgcgaacgcacacattggtcctttttgtatcgttggaccccatgtcgaaattggtgagggtaccgtactgaaatctcacgttgtcgtgaatggtcatactaaaattggccgcgataatgagatttatcagttcgcctccatcggcgaagttaaccaggatctgaaatatgctggcgaaccgacccgtgtggaaatcggcgatcgtaaccgcattcgcgaaagcgtcaccattcatcgtggcacagtccagggcggtggattgacgaaggtgggcagcgacaacttactgatgatcaacgcgcacattgcgcacgattgtacggtaggtaaccgctgtattctcgccaacaacgcaacgctggcgggtcacgtatcggttgacgacttcgcgatcatcggcggcatgaccgcagtccatcagttctgcatcattggtgcgcacgtgatggttggcggctgctccggtgtggcgcaggacgtccctccttatgtcattgcgcagggtaaccacgcaacgccgttcggtgtcaatatcgaagggctgaagcgccgcggattcagccgtgaggcgattaccgctatccgcaatgcgtataagctgatttatcgtagcggtaaaacgctcgatgaagtgaaaccggaaattgctgaactggcggaaacatatccggaagtgaaagcctttaccgatttctttgcacgctcaacgcgcggtctgattcgttaatgactgaacagcgtccattaacgattgccctggtcgccggagaaacctccggcgatatcctgggggccggtttaatccgcgctctgaaagaacatgtgcccaacgcccgctttgttggtgttgccgggccacgaatgcaggctgaaggctgcgaagcctggtacgaaatggaagaactggcggtgatgggcattgttgaagtgctcggtcgtctgcgtcgcttactgcatattcgtgccgatctgacaaagcgttttggcgaactgaagccagatgtttttgttggtattgatgcgcctgacttcaatattactcttgaaggtaacctcaaaaagcagggtatcaaaaccattcattacgtcagtccgtcagtctgggcgtggcgacagaaacgtgttttcaaaataggcagagccaccgatctggtgctcgcatttctgcctttcgaaaaagcgttttatgacaaatacaacgtaccgtgccgctttatcggtcataccatggctgatgccatgccattagatccagataaaaatgccgcccgtgatgtgctggggatccctcacgatgcccactgcctggcgttgctaccggggagccgtggtgcagaagttgaaatgcttagtgccgatttcctgaaaacggcccagcttttgcgccagacatatccggatctcgaaatcgtggtgccactggtgaatgccaaacgccgcgagcagtttgaacgcatcaaagctgaagtcgcgccagacctttcagttcatttgctggatgggatgggccgtgaggcgatggtcgccagcgatgcggcgctactggcgtcgggtacggcagccctggagtgtatgctggcgaaatgcccgatggtggtgggatatcgcatgaagccttttaccttctggttggcgaagcggctggtgaaaactgattatgtctcgctgccaaatctgctggcgggcagagagttagtcaaagaattattgcaggaagagtgtgagccgcaaaaactggctgcggcgctgttaccgctgttggcgaacgggaaaaccagccacgcgatgcacgataccttccgtgaactgcatcagcagatccgctgcaatgccgatgagcaggcggcacaagccgttctggagttagcacaatgatcgaatttgtttatccgcacacgcagctggttgcgggtgtggatgaagtcggacgcgggccgttagttggcgcggtcgtcaccgctgcggtgatccttgacccggcgcgcccgattgccgggctgaatgattccaaaaagctgagcgaaaaacgccgtctggcgctctatgaagagatcaaagagaaagcgttgagctggagtctgggccgcgcggaaccccacgaaatcgacgagctgaacattcttcatgcgaccatgctggcgatgcagcgtgccgtcgctgggctgcatattgcgccggaatatgtgttgattgatggtaaccgctgcccgaaattaccgatgcctgcgatggctgtggtgaaaggcgatagccgcgtaccggaaatcagtgccgcgtctatcctggcgaaagtgacgcgtgacgccgaaatggcggcgctggatattgttttcccgcaatatggttttgcccaacacaaagggtacccaaccgcttttcatctggaaaaactggctgaacacggcgcgaccgaacaccatcggcgcagctttgggcctgtcaaacgcgcactgggacttgcgtcctgattcttgtgtcgagattaagtaaaccggaatctgaagatgtctgaaccacgtttcgtacacctgcgggtgcacagcgactactcgatgatcgatggcctggccaaaaccgcaccgttggtaaaaaaggcggcggcgttgggtatgccagcactggcgatcaccgatttcaccaacctttgtggtctggtgaagttctacggagcgggacatggcgcagggattaagcctatcgtcggggcagattttaacgtccagtgcgacctgctgggtgatgagttaacccacctgacggtactggcggcgaacaataccggctatcagaatctgacgttgctgatctcaaaagcgtatcagcgcgggtacggtgccgccgggccgatcatcgatcgcgactggcttatcgaattaaacgaagggttgatccttctttccggcggacgcatgggcgacgtcggacgcagtcttttgcgtggtaacagcgcgctggtagatgagtgtgtcgcgttttatgaagaacacttcccggatcgctattttctcgagctgatccgcaccggcaggccggatgaagaaagctatctgcacgcggcggtggaactggcggaagcgcgcggtttgcccgtcgtggcgaccaacgacgtgcgctttatcgacagcagcgactttgacgcacacgaaatccgcgtcgcgatccacgacggctttaccctcgacgatcctaaacgcccgcgtaactattcgccgcagcaatatatgcgtagcgaagaggagatgtgtgagctgtttgccgacatccccgaagcccttgccaacaccgttgagatcgccaaacgctgtaacgtaaccgtgcgtcttggtgaatacttcctgccgcagttcccgaccggggacatgagcaccgaagattatctggtcaagcgtgcaaaagagggcctggaagagcgtctggcctttttattccctgatgaggaagaacgtcttaagcgccgcccggaatatgacgaacgtctggagactgaacttcaggttatcaaccagatgggcttcccgggctacttcctcatcgttatggaatttatccagtggtcgaaagataacggcgtaccggtagggccaggccgtggctccggtgcgggttcactggtggcctacgcgctgaaaatcaccgacctcgatccgctggaatttgacctgctgttcgaacgtttccttaacccggaacgtgtctccatgcctgacttcgacgttgacttctgtatggagaaacgcgatcaggttatcgagcacgtagcggacatgtacggtcgtgatgcggtatcgcagatcatcaccttcggtacaatggcggcgaaagcggtgatccgcgacgtaggccgcgtgctggggcatccgtacggctttgtcgatcgtatctcgaaactgatcccgcccgatccggggatgacgctggcgaaagcgtttgaagccgagccgcagctgccggaaatctacgaagcggatgaagaagttaaggcgctgatcgacatggcgcgcaaactggaaggggtcacccgtaacgccggtaagcacgccggtggggtggttatcgcgccgaccaaaattaccgattttgcgccgctttactgcgatgaagagggcaaacatccggtcacccagtttgataaaagcgacgttgaatacgccggactggtgaagttcgacttccttggtttgcgtacgctcaccatcatcaactgggcgctggagatgatcaacaagcggcgggcgaagaatggcgagccgccgctggatatcgctgcgatcccgctggatgataagaaaagcttcgacatgctgcaacgctcggaaaccacggcggtattccagcttgaatcgcgcggcatgaaggacctgatcaagcgtctacaacctgactgcttcgaagatatgatcgccctagtggcactgttccgccccggtccgttgcaatcagggatggtggataactttatcgaccgtaaacatggtcgtgaagagatctcctatccggacgtacagtggcagcatgaaagcctgaaaccggtactggagccaacctacggcattatcctgtatcaggaacaggtcatgcagattgcgcaggtgctttctggttataccctcggtggcgcggatatgctgcgtcgtgcgatgggtaagaaaaagccggaagagatggctaagcaacgttctgtatttgctgaaggtgcagaaaagaacggaatcaacgctgaactggcgatgaaaatcttcgacctggtggagaaattcgctggttacggatttaacaaatcgcactctgcggcctatgctttggtgtcatatcaaacgttatggctgaaagcgcactatcctgcggagtttatggcggcggtaatgaccgccgatatggacaacaccgagaaggtggtgggtctggtggatgagtgctggcggatggggctgaaaatcctgccaccagatataaactccggtctttaccatttccacgtcaacgacgacggcgaaatcgtgtatggtattggcgcgatcaaaggggtcggtgaaggtccgattgaggccatcatcgaagcccgtaataaaggcggctacttccgcgaactgtttgatctctgcgcccgtaccgacaccaaaaagttgaaccgtcgcgtgctggaaaaactgatcatgtccggggcgtttgaccgtcttgggccacatcgcgcagcgctgatgaactcgctgggcgatgcgttaaaagcggcagatcaacacgcgaaagcggaagctatcggtcaggccgatatgttcggcgtgctggccgaagagccggaacaaattgaacaatcctacgccagctgccaaccgtggccggagcaggtggtattagatggggaacgtgaaacgttaggcctgtacctgaccggacaccctatcaaccagtatttaaaagagattgagcgttatgtcggaggcgtaaggctgaaagacatgcacccgacagaacgtggtaaagtcatcacggctgcggggctcgttgttgccgcgcgggttatggtcaccaagcgcggcaatcgtatcggtatctgcacgctggatgaccgttccgggcggctggaagtgatgttgtttactgacgccctggataaataccagcaattgctggaaaaagaccgcatacttatcgtcagcggacaggtcagctttgatgacttcagcggtgggcttaaaatgaccgctcgcgaagtgatggatattgacgaagcccgggaaaaatatgctcgcgggcttgctatctcgctgacggacaggcaaattgatgaccagcttttaaaccgactccgtcagtctctggaaccccaccgctctgggacaattccagtacatctctactatcagagggcggatgcacgcgcgcggttgcgttttggcgcgacgtggcgtgtctctccgagcgatcgtttattaaacgatctccgtggcctcattggttcggagcaggtggaactggagtttgactaatacaggaatactatgagtctgaatttccttgattttgaacagccgattgcagagctggaagcgaaaatcgattctctgactgcggttagccgtcaggatgagaaactggatattaacatcgatgaagaagtgcatcgtctgcgtgaaaaaagcgtagaactgacacgtaaaatcttcgccgatctcggtgcatggcagattgcgcaactggcacgccatccacagcgtccttataccctggattacgttcgcctggcatttgatgaatttgacgaactggctggcgaccgcgcgtatgcagacgataaagctatcgtcggtggtatcgcccgtctcgatggtcgtccggtgatgatcattggtcatcaaaaaggtcgtgaaaccaaagaaaaaattcgccgtaactttggtatgccagcgccagaaggttaccgcaaagcactgcgtctgatgcaaatggctgaacgctttaagatgcctatcatcacctttatcgacaccccgggggcttatcctggcgtgggcgcagaagagcgtggtcagtctgaagccattgcacgcaacctgcgtgaaatgtctcgcctcggcgtaccggtagtttgtacggttatcggtgaaggtggttctggcggtgcgctggcgattggcgtgggcgataaagtgaatatgctgcaatacagcacctattccgttatctcgccggaaggttgtgcgtccattctgtggaagagcgccgacaaagcgccgctggcggctgaagcgatgggtatcattgctccgcgtctgaaagaactgaaactgatcgactccatcatcccggaaccactgggtggtgctcaccgtaacccggaagcgatggcggcatcgttgaaagcgcaactgctggcggatctggccgatctcgacgtgttaagcactgaagatttaaaaaatcgtcgttatcagcgcctgatgagctacggttacgcgtaattcgcaaaagttctgaaaaagggtcacttcggtggcccttttttatcgccacggtttgagcaggctatgattaaggaaggattttccaggaggaacacatgaacatcattgccattatgggaccgcatggcgtcttttataaagatgagcccatcaaagaactggagtcggcgctggtggcgcaaggctttcagattatctggccacaaaacagcgttgatttgctgaaatttatcgagcataaccctcgaatttgcggcgtgatttttgactgggatgagtacagtctcgatttatgtagcgatatcaatcagcttaatgaatatctcccgctttatgccttcatcaacacccactcgacgatggatgtcagcgtgcaggatatgcggatggcgctctggttttttgaatatgcgctggggcaggcggaagatatcgccattcgtatgcgtcagtacaccgacgaatatcttgataacattacaccgccgttcacgaaagccttgtttacctacgtcaaagagcggaagtacaccttttgtacgccggggcatatgggcggcaccgcatatcaaaaaagcccggttggctgtctgttttatgattttttcggcgggaatactcttaaggctgatgtctctatttcggtcaccgagcttggttcgttgctcgaccacaccgggccacacctggaagcggaagagtacatcgcgcggacttttggcgcggaacagagttatatcgttaccaacggaacatcgacgtcgaacaaaattgtgggtatgtacgccgcgccatccggcagtacgctgttgatcgaccgcaattgtcataaatcgctggcgcatctgttgatgatgaacgatgtagtgccagtctggctgaaaccgacgcgtaatgcgttggggattcttggtgggatcccgcgccgtgaatttactcgcgacagcatcgaagagaaagtcgctgctaccacgcaagcacaatggccggttcatgcggtgatcaccaactccacctatgatggcttgctctacaacaccgactggatcaaacagacgctggatgtcccgtcgattcacttcgattctgcctgggtgccgtacacccattttcatccgatctaccagggtaaaagtggtatgagcggcgagcgtgttgcgggaaaagtgatcttcgaaacgcaatcgacccacaaaatgctggcggcgttatcgcaggcttcgctgatccacattaaaggcgagtatgacgaagaggcctttaacgaagcctttatgatgcataccaccacctcgcccagttatcccattgttgcttcggttgagacggcggcggcgatgctgcgtggtaatccgggcaaacggctgattaaccgttcagtagaacgagctctgcattttcgcaaagaggtccagcggctgcgggaagagtctgacggttggtttttcgatatctggcaaccgccgcaggtggatgaagccgaatgctggcccgttgcgcctggcgaacagtggcacggctttaacgatgcggatgccgatcatatgtttctcgatccggttaaagtcactattttgacaccggggatggacgagcagggcaatatgagcgaggaggggatcccggcggcgctggtagcaaaattcctcgacgaacgtgggatcgtagtagagaaaaccggcccttataacctgctgtttctctttagtattggcatcgataaaaccaaagcaatgggattattgcgtgggttgacggaattcaaacgctcttacgatctcaacctgcggatcaaaaatatgctacccgatctctatgcagaagatcccgatttctaccgcaatatgcgtattcaggatctggcacaagggatccataagctgattcgtaaacacgatcttcccggtttgatgttgcgggcattcgatactttgccggagatgatcatgacgccacatcaggcatggcaacgacaaattaaaggcgaagtagaaaccattgcgctggaacaactggtcggtagagtatcggcaaatatgatcctgccttatccaccgggcgtaccgctgttgatgcctggagaaatgctgaccaaagagagccgcacagtactcgattttctactgatgctttgttccgtcgggcaacattaccccggttttgaaacggatattcacggcgcgaaacaggacgaagacggcgtttaccgcgtacgagtcctaaaaatggcgggataacttgccagagcggcttccgggcgagtaacgtgctgttaacaaataaaggagacgttatgctgggtttaaaacaggttcaccatattgcgattattgcgacggattatgcggtgagcaaagctttctactgcgatattcttggtttcacgctgcaaagcgaagtctatcgcgaagcgcgcgactcatggaaaggggatttggcgcttaatgggcaatatgtgattgagcttttctcatttccgttcccgccggaacgacccagccgaccggaagcttgcggtctgcgtcatctggcttttagcgttgatgacatcgatgcggcagtggcgcaccttgaaagccataacgtgaagtgtgaaaccatccgtgtcgatccatacacgcaaaaacgcttcaccttctttaacgatccggacgggctgccgttggaactgtatgagcagtaaggcttgtcatcgccgcatttgcccggtaacgtgccgggcattgctactgtaaaatcgcaccatcatgacactcacgctcaatagacaacttctcacctcacgccagattctggtggcctttagcggcgggcttgactccaccgttctgctgcatcagttggtgcagtggcggacggaaaatccgggtgtcgctctgcgcgctattcatgtgcatcacggtttaagtgccaatgccgatgcctgggttacgcattgcgaaaacgtctgccaacagtggcaggtgccgctggtggtcgaacgcgtacaacttgcgcaagaaggactgggcattgaggcccaggcgcggcaggcacgttatcaggcatttgcccgcaccttgttgcccggtgaagtgctggtcaccgcgcaacatctcgacgatcaatgtgaaacctttctgctggcgctaaaacgcggcagtggccctgccgggctttcggctatggcggaagtctcggagtttgccggaacgcggcttattcgcccgttgctcgcccgcacgcggggggaactggtgcagtgggcgcgtcagtatgatttacgctggattgaagacgaaagtaatcaggacgactcatacgatcgtaactttctgcgcctgcgcgtagtgccgttattgcagcagcgttggccgcattttgccgaagcaacggcccgcagcgccgcactttgtgctgaacaagagagcctgctggatgaactgctggcagatgatttagcacactgtcaatcgccgcaggggacgctgcagattgtgccaatgctggcgatgagtgatgcccgccgcgcggcgattatccgccgctggctggcagggcagaatgcaccgatgccttcccgcgacgcgttggtgaggatctggcaggaagtggcgctggcgcgggaagatgcctcaccctgtttacgtttgggcgcgtttgaaatccgacgctatcagtcgcaactgtggtggattaaatccgtcaccgggcaaagcgaaaacattgtgccgtggcagacgtggcttcaaccgctggaattaccggcggggctgggaagtgtacagcttaatgcgggaggcgatattcgccctccgcgtgcagacgaagcggtcagcgtgcgtttcaaagcgccaggattgctgcatattgtcgggcgtaacggcggacgtaagctaaagaaaatctggcaagagctgggcgtgccgccgtggctacgtgacaccacgccactgctgttttatggcgaaacgctgattgcggcggcaggggtatttgtgacgcaagaaggtgtggctgaaggtgagaatggcgtaagttttgtctggcagaaaacgcttagttaagtgaaagccggataagacgcatcaaacgtcgcatccggcgaaagtcaatcaggattcgcttaccaccaccgtaccgatttccgggtggctaaagctggtaattttatccagacgcagctcgcgggtttcgccagcggcctcgacgaccaggtactccacatttttgcgggagactaaatcactggcttttgcctgcaatttttcgccatctttcagctcaagtgtcagcattaaatgatgctggcaggcgagctcaagattatcgtaatcatcacaattgattggttgatacgtatcattcattgacataatcgctcaccagtaagtttgccgcagcgtatgctgctttttccctgacagcctcagaaagggcgtcgtcggcagccatttcattcagcactttcaaaacgcagcccagcgcgtccggaacgtatcctaagtctccgctggcgatttccgcgtaccgcttgcgtattaactcacaatatttttccacatgccctcctgtcagcactctgacttaaccgtggatgcaagtctaagcctacgaagataaactctgtttcgcaaggtgactataccacactcatttctgcaatatcagcgccgcaactgcacgtattccgttacaatggcctcctgattcgaaaggagttttcttatggcgcttaaagcgacaatttataaagcgacggttaatgtggccgatctcgaccgcaaccagtttctcgatgcctctctgacgctggcgcgccatccttcagaaacccaggagcgtatgatgctgcgcttgctggcgtggctgaaatatgctgatgaacgtctgcaatttacccgtggtttgtgtgccgatgatgagccggaagcgtggctgcgtaacgatcacctgggcattgatttgtggattgagctggggctgccggatgagcggcggattaagaaagcctgcacccaggccgcagaagtggcgctgtttacctataatagtcgggcggcgcaaatctggtggcagcaaaatcagagcaaatgtgtgcagtttgccaatctttccgtctggtatctggacgatgaacaactggcgaaagtaagcgcctttgccgatcgtaccatgacgctgcaggcaacgattcaggatggcgtgatctggttatcggatgataagaataatctggaagtgaacttaaccgcctggcaacaaccttcatgattgtgatttcccgacatgttgctattcccgatggtgagcttgagatcaccgccattcgtgcgcagggcgcgggcgggcagcatgttaataagacctcaacggctattcatctgcgttttgacattcgggcgtccagcctgccagagtattacaaagagcgtctgctcgccgccagccatcatttgatcagcagtgatggcgtgattgtcattaaggcacaggaataccgcagtcaggaactgaaccgcgaagcagctctggcccggctggtggctatgattaaagaattaacaacagaaaaaaaagcccgacgacccacgcggcccacccgtgcatcgaaagagcgcaggctggcatcgaaagcacaaaaatcaagcgtgaaggcgatgcgcggcaaagtgcgcagcggtcgggaataaaaagaaggaatggatggtgaaaaaagcgatagtgacagcgatggctgtaatcagcctctttactctgatgggatgtaataatcgggccgaagtcgatacgctttctccggcgcaggctgccgaactgaaaccgatgccgcaaagttggcgcggcgtgctgccgtgtgccgattgcgaaggaatcgaaacctctctgttcctcgaaaaagacggaacatgggtgatgaatgagcgttatctcggtgctcgtgaagaaccttcctccttcgcttcctacggtacatgggcgcgaaccgctgacaagctggtattaaccgacagcaaaggtgaaaagtcatattatcgggcgaaaggcgatgcgctggagatgctcgatcgtgaaggcaatccgattgaatcgcagttcaactatacgctggaagcggcacaatccagtttacctatgacgccgatgaccctgcggggcatgtatttttatatggctgatgcggcgaccttcactgattgcgcgaccggaaaacgtttcatggtagcgaataacgcagagctggagcgtagctacctggctgcgcgcggtcacagtgaaaaaccggtgttactgtcagtagaaggtcactttacgcttgagggtaatccggataccggtgcgccgactaaagtattggcacccgatacggcagggaaattttaccccaaccaggattgcagtagtttggggcagtaacccgtcttgagacagaaacaaacgcaaaacaggccagaaggatatatttcaacattttgaatttgcacgttttttgtaggccggataaggcgtttacgccgcatccggcaatggtgctcaacgcctgatgcgacgctggcgcgtcttatcatgcctacaacccccctcataccttaaggcggataaggcatttactttatcaccgggtcaaaccaacaaagcgacccgccttgatataaatcccaggcttcaggtgcccaacatactgtaactgcgtttctggcttaaacgcagagacatcaccaatacgcatatgcatcagatcggcagggctaatccagcccgattgcgccagtgtaagtggatgcccggctttggcaaaggcatccgtgacaaattccgaacaaaaccacgactttttgtctccttcgcccacactgcttaactgcgctttcgccaggccgctgacgcactgttggcgaaaatcctcggagaacggattcagtgagcacatctggcgagtcaccataaagggaataaattcgacaatgccgcgatagttataaccgctatctttgattttattggcaaacgcggtgatatctgtggcttgttgcggggtaagatccgggactcgtaagacgaaaagcttatcactatgcttcatcgcttttttaagggaaacgatctggacgccagcgcctgtcgcttctgcaacgttattatcacccagaaagattgcaacgtgactcacagaggaagtgctgaagacgcggattccaaatgaggttaccccaaggcttgaggagaacagcaaatcgccgggtttgagatcaggtgccgttatttcttttattgattgttcggtgaaagagctttgatgctggaatttgacagcccatgtttttgcctcggcatctactgctgtggctgatgggtctggctggctgatatcaacggtacaagccgaaagtaaaagaaagctggggagaaacaggcggcagtacgcctttggtttatccattttatacaatccatgtaaaaaaagggccctgaaattcaggaccctttctggcatcagcctttaatctgtttcaccagatattcgacgatgtcaccagtcttaattaactgtttctcgccgttgcgacgatatttatattcgatatcgtcgttgtcgaggttacggtcgcccagcacaatagtgtgcggaataccgatcagttccatatcagcaaacatcacgcccggacgctctttgcggtcatccagcagcacttcgataccttgtgcacgcagttcgctgtacagtttctcagcaagctcttgtacgcggaaggatttgtgcatgttcatcggcagaatcgccacctggaacggcgcgatagcgtcaggccatacgatgcctcgttcgtcgtagttctgctcaatcgccgcagctaccacacgcgttaccccgataccgtagcaacccatcgtcaggatttggttacggccatcttcaccctgtacggaggctttcagtgcttcggagtacttggtacccagctggaagatgtgaccaacttcgataccacgtttgatcagcagcctaccctggccatccgggcttggatcgccagccaccacgttacggatatctgcaacttccggggtagcgacatcgcgatcccagttgatgccgaagtagtgtttaccatcgatgttagcaccagcagcgaaatcactcatcgccgcaacggtacggtcaatcaccaccggaatcggcatgtttaccggacccagtgaacccggaccggctttaaccacggcacgaatttcttcttcggtcgcgaaagtcagcgggcttgcaacctgcggcagtttttctgctttaacttcgttcagctcgtgatcaccgcgcaccagcagcgcaacctgcgggaagctgctgccttcaaccgctttaaccagcagagtcttaaccgttttctcaatcggcagattgaactgttcaaccagttccgcgatggttttcgcgttcggcgtatcaaccagcgtcatttcctgggtagcagcagcgcgcggttctttcggcgcgatagcttctgccagttcaatgttcgctgcatagtcagaggtgtcggagaagaccacatcgtcttcaccgctctgcgccagcacctggaattcgtgagaggcgctgccgccgatagaaccggtgtcggcttgtacggcgcggaaatccagccccatgcggctgaagattttgctgtaggccgcatacattgcatcgtaggtttcctgcagggattcctgagaagtatggaaagagtaagcatctttcatcaggaattcgcgggaacgcatgacgccgaaacgcggacgcacttcgtcgcggaacttggtctggatctgatagaagttcagcggcagctgtttgtaagagctaagctcgttacgaatcaggtcagtgataacttcttcatgagttgggccgagtacgaacggacgctcgccacggtcaacaaaacgcagcagttccggaccgtactgttcccaacgaccactctcttgccacaaatcggctggctgaaccaccggcatcgacacctcgatcgcaccggcgttgttcatctcttcacgcacgatgttttcgacttttttcagaacgcgcacgccggtcggcagccaggtatataacccggaggccagcttgcggatcatcccggcgcgcagcatcagctgatggctgatcacctcggcgtcggcaggtgtctccttgagagtggagagcaggtattggctagtacgcatgttgttacggttccagttggaaggtagaacaggctcaaggcgagcctgggacaaaaaaaagtgatttagtttaccagtgcaaaagaaatgtcaaaagagaagggcgtgaatttaacgcggttccagcgcaaagacttcaaaacctgcgtcggtgacgcgccagcgaacgttaaaatcatgtagccagacggcataggttttgcccgtttcctcacctttacgataggccgggcgcgggtcctgcgccagtacttcgcggataaacagcgttaactgcggataacgcttctccagcgtcaaaagctgcttttcgacctctgcggtaaaactcaccgccatctctgcagctggcgcactttgcgcatagctggcactggcatcgggaagcgattcggcaaaggggagatacggtttgatatccactaccggcgtaccatcgaccagatccagactgccgagcttcagaatcacgctgtctttatggcaaacaacctctttcagctctaccagcgacatgccaattgggttagggcggaaagtagagcgtgttgcgaaaacccccattctggcgttaccgccgaggcgcggtggacgcacagtcggacgccagccgccttccatcgtttgatgaaagacgaaaaggatccataaatggctgaacgcttccaggccgcgaacggcgtcggcctggttgtagggagcaatgagatgcagttcgccgttggcgctttttaccagacctggctggcgcggaacggcgaacttttctttatagggcgagcgaataacgcctatttgctcgaactggaaactgctcatttcgccgtaatgttaagcgcagaaccgatacatacagcctgacgatagcagcctggcgtaccgctggtgacttcgcagctatgcagtaatacagcattggctttcattttagaggcgttgatttgcatccgcttacgtgcggttggaatgctcggcggagagtcctgattagaggcctggcaagagtcgccactgacttcaccgagatcgcggaacggtttgccgactaattcttctgcattggtataaattcggaccggcgtggcgcgcggcgctttcggttttgcaggctccgctttcggctggggtgcagtgctttgaacgggttcgacaggggatctgcttaacatggaacagccgcttagcatgagtgctactaaacagatcggtaaagcacgcatagtatttcctcaatgtatgatcaaaacgtcaatattgaatcaggagcttgtaaaaatgacaagacgggcaagcgcccgtcctgaatgatattacaaattgtggaaacagcctaaaaattaccagcctttaacagctccgccgttaaacactttgtttgctgcttcgtaaacttcgtcagactgataagcctggacgaatttcttcacgttctcggcgtctttgttatcttcacgcgtcacgatcaggtttacgtacggggactctttatcttcaacaaagataccgtctttcgccggagtcaggccaatctggctggcataggtggtattgataactgccagagcgatttgcgcgtcgtccagagaacgcggcagttgcggtgcttccagttcaacaattttcagatttttggggttctcaacaacatcaagaacggtcggcagcaggccaacgccatctttcagtttgatcaagcccactttttgcagcagcagcagtgaacgaccaaggttagttgggtcgtttggcacggcaacctgcgaaccatcctgcagttcatccagtgatttgattttcttggagtaaccagcaatcggataaacaaaagtgttgcctactgcgaccagtttgtagccacgatctttcagttgctgatcaaggtacggtttatgctggaaggcgttggcgtcgatatcgcctttgctcaatgcttcgtttggcagaacatagtcgttgaaggttaccagctcaacgtccaggccatatttgtctttcgcaactttctgcgcgacttctgcaacctgctgttcggcaccaacaatcacgccgactttaatgtggtttggatctttttcatcctgaccgcagcctaccagtgccagtgatccgatcagggctcccactgccgcaaaggttttgaatttgaacgccataccttattccttcttcaattatttatgttgtgttgaacgttacttgcgagtgacagcccggacgatgcggtcgcctgcgaactgaattaaataaaccagaatgaccagcaataccagtaccgtattcatcaccgtcgcgttatagccgatgtagccatactgatagccaatctgacctaaaccaccggcaccgactgcaccacccatcgcggaataaccgaccagggtaatcagggtgatagttgccgcattcaccagacccggcagcgcttccggtaacagcaccttacggacgatctgcatcggcgtggcacccattgcgcgggaagcttcaattaacccggttgggatctccagcagagcgttctcgaccatacgggcaataaacggtgctgcaccaacggttaacggaacaatcgctgcctgcaaaccaatcgatgtaccgacaataacgcgggtaaacggaatcatccatacaagcaagataatgaacgggatggaacggaaaatgttcacaatcgcagaaacggtacgatacagcttcgcgttagcaataatttgccccggacgcgtgacataaagcagaacgccaaccggcagaccaatcacaaagccaaaaaaaccggatacgaaggtcattgccagcgtttcccatacgccacgaaccagcagccacatcatcggctcagacataacccagtacctctacttttacatggtgttcctgcagccaggcaatggcggcttgcgtatcttgttgtgtgccgtgcatttcagtcagcatgatgccgaacttaacgccaccggcgtaatccatctgcgcgctaataatgttgttgttgacgttgaaacgacgcgcggtttcagaaagcagtggggcatcgaccgattgaccggtaaactccagacgcagcatcggcacgcagtcagtaaatggctccgcttgcagacgttcctggtaatcttccgggatatccagatgcagggtcgactgaataaacttctgcgccagcggcgttttcggatgcgagaacacttcacttaccgtgtcctgctcgatcagttctccattgctgatgaccgccacgcaatcacaaatgcgcttcacaacgtccatttcgtgggtgatcaacagaatcgtcaaccccagacggcggttgatgtctttcagcagttcgagaatagaacgtgtcgttgccgggtccagcgcgctggtggcttcatcacacagcaatactttgggattgctggctaacgcacgggcaattgccacacgttgtttctgcccaccggaaagattcgacgggtagctatcatgcttatcgccaagaccaaccaatgacagcaattccgtcacgcgacgtttgacctcgtctttcggtgtgttgtccagctccagcggcagagccacgttgccaaaaacagtacgcgaagagagcaggttaaaatgctggaaaatcataccaatctggcggcgagctttggtcaactcggattctgacagcgtggtcagttcctggccatcgaccagcacgctaccctcggttgggcgctccagcaggtttacacaacgtataagcgtactcttacccgcgcctgaggcaccgataacgccataaatttgtccagctggcacatgcaggctgacgttgttcaacgcctggatggtgcgggtgccctggtggaacactttggtgatattcgaaagttttatcattgattatttattatcgtcattaagttagtcgtggcatctcgaatgcctgaaacgggcaacgccgtcaatgaaatggatgttaaggcatccagacgtctaaatcaatcaggtttatgcgaagagcactttcttgcaggtcgaaacatgcgatactagcgtcacatgccttattaaggagctataaaaggtggcgaagagcgtacccgcaatttttcttgaccgtgatggcaccattaatgtcgatcacggctatgtccatgagatcgacaactttgaatttatcgacggtgttattgacgccatgcgcgagctaaaaaaaatgggctttgcgctggtggtagtaaccaaccagtctggcattgctcgcggtaaatttaccgaagcacagtttgaaacgctgaccgagtggatggactggtcgctggcggaccgagatgtcgatctggatggtatctattattgcccgcatcatccgcagggtagtgttgaagagtttcgccaggtctgcgattgccgcaaaccacatccggggatgcttttgtcagcacgcgattatttgcatattgatatggccgcttcttatatggtgggcgataaattagaagatatgcaggcagcggttgcggcgaacgtgggaacaaaagtgctggtgcgtacgggtaaacctattacgcctgaagcagaaaacgcggcggattgggtgttaaatagcctggcagacctgccgcaagcgataaaaaagcagcaaaaaccggcacaatgattaaaagatgagcggttgaaataaaaatgcatttttccgcttgtcttcctgagccgactccctataatgcgcctccatcgacacggcggatgtgaatcacttcacacaaacagccggttcggttgaagagaaaaatcctgaaattcagggttgactctgaaagaggaaagcgtaatatacgccacctcgcgacagtgagctgaaagccgcgtcgcaactgctctttaacaatttatcagacaatctgtgtgggcactcgaagatacggattcttaacgtcgcaagacgaaaaatgaataccaagtctcaagagtgaacacgtaattcattacaaagtttaattctttgagcatcaaacttttaaattgaagagtttgatcatggctcagattgaacgctggcggcaggcctaacacatgcaagtcgaacggtaacaggaagaagcttgcttctttgctgacgagtggcggacgggtgagtaatgtctgggaaactgcctgatggagggggataactactggaaacggtagctaataccgcataacgtcgcaagaccaaagagggggaccttcgggcctcttgccatcggatgtgcccagatgggattagctagtaggtggggtaacggctcacctaggcgacgatccctagctggtctgagaggatgaccagccacactggaactgagacacggtccagactcctacgggaggcagcagtggggaatattgcacaatgggcgcaagcctgatgcagccatgccgcgtgtatgaagaaggccttcgggttgtaaagtactttcagcggggaggaagggagtaaagttaatacctttgctcattgacgttacccgcagaagaagcaccggctaactccgtgccagcagccgcggtaatacggagggtgcaagcgttaatcggaattactgggcgtaaagcgcacgcaggcggtttgttaagtcagatgtgaaatccccgggctcaacctgggaactgcatctgatactggcaagcttgagtctcgtagaggggggtagaattccaggtgtagcggtgaaatgcgtagagatctggaggaataccggtggcgaaggcggccccctggacgaagactgacgctcaggtgcgaaagcgtggggagcaaacaggattagataccctggtagtccacgccgtaaacgatgtcgacttggaggttgtgcccttgaggcgtggcttccggagctaacgcgttaagtcgaccgcctggggagtacggccgcaaggttaaaactcaaatgaattgacgggggcccgcacaagcggtggagcatgtggtttaattcgatgcaacgcgaagaaccttacctggtcttgacatccacagaactttccagagatggattggtgccttcgggaactgtgagacaggtgctgcatggctgtcgtcagctcgtgttgtgaaatgttgggttaagtcccgcaacgagcgcaacccttatcttttgttgccagcggtccggccgggaactcaaaggagactgccagtgataaactggaggaaggtggggatgacgtcaagtcatcatggcccttacgaccagggctacacacgtgctacaatggcgcatacaaagagaagcgacctcgcgagagcaagcggacctcataaagtgcgtcgtagtccggattggagtctgcaactcgactccatgaagtcggaatcgctagtaatcgtggatcagaatgccacggtgaatacgttcccgggccttgtacacaccgcccgtcacaccatgggagtgggttgcaaaagaagtaggtagcttaaccttcgggagggcgcttaccactttgtgattcatgactggggtgaagtcgtaacaaggtaaccgtaggggaacctgcggttggatcacctccttaccttaaagaagcgtactttgcagtgctcacacagattgtctgatgaaaatgagcagtaaaacctctacaggcttgtagctcaggtggttagagcgcacccctgataagggtgaggtcggtggttcaagtccactcaggcctaccaaatttgcacggcaaatttgaagaggttttaactacatgttatggggctatagctcagctgggagagcgcctgctttgcacgcaggaggtctgcggttcgatcccgcatagctccaccatctctgtagtggttaaataaaaaatacttcagagtgtacctgcaaaggttcactgcgaagttttgctctttaaaaatctggatcaagctgaaaattgaaacactgaacaatgaaagttgttcgtgagtctctcaaattttcgcaacacgatgatggatcgcaagaaacatcttcgggttgtgaggttaagcgactaagcgtacacggtggatgccctggcagtcagaggcgatgaaggacgtgctaatctgcgataagcgtcggtaaggtgatatgaaccgttataaccggcgatttccgaatggggaaacccagtgtgtttcgacacactatcattaactgaatccataggttaatgaggcgaaccgggggaactgaaacatctaagtaccccgaggaaaagaaatcaaccgagattcccccagtagcggcgagcgaacggggaggagcccagagcctgaatcagtgtgtgtgttagtggaagcgtctggaaaggcgcgcgatacagggtgacagccccgtacacaaaaatgcacatgctgtgagctcgatgagtagggcgggacacgtggtatcctgtctgaatatggggggaccatcctccaaggctaaatactcctgactgaccgatagtgaaccagtaccgtgagggaaaggcgaaaagaaccccggcgaggggagtgaaaaagaacctgaaaccgtgtacgtacaagcagtgggagcatgcttaggcgtgtgactgcgtaccttttgtataatgggtcagcgacttatattctgtagcaaggttaaccgaataggggagccgaagggaaaccgagtcttaactgggcgttaagttgcagggtatagacccgaaacccggtgatctagccatgggcaggttgaaggttgggtaacactaactggaggaccgaaccgactaatgttgaaaaattagcggatgacttgtggctgggggtgaaaggccaatcaaaccgggagatagctggttctccccgaaagctatttaggtagcgcctcgtgaactcatctccgggggtagagcactgtttcggcaagggggtcatcccgacttaccaacccgatgcaaactgcgaataccggagaatgttatcacgggagacacacggcgggtgctaacgtccgtcgtgaagagggaaacaacccagaccgccagctaaggtcccaaagtcatggttaagtgggaaacgatgtgggaaggcccagacagccaggatgttggcttagaagcagccatcatttaaagaaagcgtaatagctcactggtcgagtcggcctgcgcggaagatgtaacggggctaaaccatgcaccgaagctgcggcagcgacgcttatgcgttgttgggtaggggagcgttctgtaagcctgtgaaggtgtactgtgaggtatgctggaggtatcagaagtgcgaatgctgacataagtaacgataaagcgggtgaaaagcccgctcgccggaagaccaagggttcctgtccaacgttaatcggggcagggtgagtcgacccctaaggcgaggccgaaaggcgtagtcgatgggaaacaggttaatattcctgtacttggtgttactgcgaaggggggacggagaaggctatgttggccgggcgacggttgtcccggtttaagcgtgtaggctggttttccaggcaaatccggaaaatcaaggctgaggcgtgatgacgaggcactacggtgctgaagcaacaaatgccctgcttccaggaaaagcctctaagcatcaggtaacatcaaatcgtaccccaaaccgacacaggtggtcaggtagagaataccaaggcgcttgagagaactcgggtgaaggaactaggcaaaatggtgccgtaacttcgggagaaggcacgctgatatgtaggtgaagcgacttgctcgtggagctgaaatcagtcgaagataccagctggctgcaactgtttattaaaaacacagcactgtgcaaacacgaaagtggacgtatacggtgtgacgcctgcccggtgccggaaggttaattgatggggttagcgcaagcgaagctcttgatcgaagccccggtaaacggcggccgtaactataacggtcctaaggtagcgaaattccttgtcgggtaagttccgacctgcacgaatggcgtaatgatggccaggctgtctccacccgagactcagtgaaattgaactcgctgtgaagatgcagtgtacccgcggcaagacggaaagaccccgtgaacctttactatagcttgacactgaacattgagccttgatgtgtaggataggtgggaggctttgaagtgtggacgccagtctgcatggagccgaccttgaaataccaccctttaatgtttgatgttctaacgttgacccgtaatccgggttgcggacagtgtctggtgggtagtttgactggggcggtctcctcctaaagagtaacggaggagcacgaaggttggctaatcctggtcggacatcaggaggttagtgcaatggcataagccagcttgactgcgagcgtgacggcgcgagcaggtgcgaaagcaggtcatagtgatccggtggttctgaatggaagggccatcgctcaacggataaaaggtactccggggataacaggctgataccgcccaagagttcatatcgacggcggtgtttggcacctcgatgtcggctcatcacatcctggggctgaagtaggtcccaagggtatggctgttcgccatttaaagtggtacgcgagctgggtttagaacgtcgtgagacagttcggtccctatctgccgtgggcgctggagaactgaggggggctgctcctagtacgagaggaccggagtggacgcatcactggtgttcgggttgtcatgccaatggcactgcccggtagctaaatgcggaagagataagtgctgaaagcatctaagcacgaaacttgccccgagatgagttctccctgactccttgagagtcctgaaggaacgttgaagacgacgacgttgataggccgggtgtgtaagcgcagcgatgcgttgagctaaccggtactaatgaaccgtgaggcttaaccttacaacgccgaagctgttttggcggattgagagaagattttcagcctgatacagattaaatcagaacgcagaagcggtctgataaaacagaatttgcctggcggccgtagcgcggtggtcccacctgaccccatgccgaactcagaagtgaaacgccgtagcgccgatggtagtgtggggtctccccatgcgagagtagggaactgccaggcatcaaattaagcagtaagccggtcataaaaccggtggttgtaaaagaattcggtggagcggtagttcagtcggttagaatacctgcctgtcacgcagggggtcgcgggttcgagtcccgtccgttccgccacttattaagaagcctcgagttaacgctcgaggttttttttcgtctgtatatctattattgccagaatcgcaaaaatcctctgcattttacgctctttttcctcaacagtctgaagcccataatcacctcagttaacgaaaatagcattaaaagaggcatattatggctatccctgcatttggtttaggtactttccgtctgaaagacgacgttgttatttcatctgtgataacggcgcttgaacttggttatcgcgcaattgataccgcacaaatctatgataacgaagccgcagtaggtcaggcgattgcagaaagtggcgtgccacgtcatgaactctacatcaccactaaaatctggattgaaaatctcagcaaagacaaattgatcccaagtctgaaagagagcctgcaaaaattgcgtaccgattatgttgatctgacgctaatccactggccgtcaccaaacgatgaagtctctgttgaagagtttatgcaggcgctgctggaagccaaaaaacaagggctgacgcgtgagatcggtatttccaacttcacgatcccgttgatggaaaaagcgattgctgctgttggtgctgaaaacatcgctactaaccagattgaactctctccttatctgcaaaaccgtaaagtggttgcctgggctaaacagcacggcatccatattacttcctatatgacgctggcgtatggtaaggccctgaaagatgaggttattgctcgtatcgcagctaaacacaatgcgactccggcacaagtgattctggcgtgggctatgggggaaggttactcagtaattccttcttctactaaacgtaaaaacctggaaagtaatcttaaggcacaaaatttacagcttgatgccgaagataaaaaagcgatcgccgcactggattgcaacgaccgcctggttagcccggaaggtctggctcctgaatgggattaagcctctctgacagctcctccgggagctgtttttacatgctcgctaaggaaatcgataaaagcccggatgcgcgtacttaccgcacggtcgctgtaatagacggcactgaatggcatttccactggcaacactttatctgccattaactccaccaattctccgcgagcgatttctttgtcgatcatgtagtcggacaaacacgcaatcccgttgccactcaggcaaagctgtttcagtgtttccccactattggatgacaaaccgtacttcacctcatgtaattgtccatcgctacgggctatcggccaggtattgagggaagcgggttcagtgaatcccaggcaaatatgttgctttaaatcgtcgatcgtttctggcttcccgtagcgggaaatataatcgggggaggcgataatttttcgataactgttaaataacggcctggcacgtaagctggaatccgttaacgtaccagcgcgtatcgcgacatccacttttctttcgatcaaattaataatcgtttcggaggagactagcgacaaagtgacttccggatagcgttcacggaaaggcttaattaacggcatcagaaagtgcagcaccactggagttgcggcatcgatccgtaacagtccacgcggtgtattacgcgtctccataatttctgattctgccgctgccatctcctgcaaaattgactgtacgcgacgaaaataacgctcgccttcttccgtcaggctaagttgtcgcgtggtccgattaagcaggctaacgccaagtttcatctccagctttttcaccgcccggcttaccgctgagtttgcttgccctaattgttccgctgcccggctaaagctgccgctttcgacgaccgaaacaaaaatggcgagttcttccgacgtggctttcatttttgctcctgttgcaaaatagaagagatattttgaatttatttgtcattaaaccatcaggatgcgtgatatgtcatgcgatttaatgttctccataatgagcaaaattctgaccggtgtaagcacttgcttacataacaatatacaattgctcgttgaaagagtgagctaaaatccctataacagtagaaccctcccgagtgcggaagggttgacgtaatagaggtttcaaagtcaaaagtgcgaaaaaacacctatgccatgcgctatgttgccggacaacctgcggaaaggatcttaccgccggggtcttttgcgagcatcggccaggcattaccacctggggaaccgttaagtaccgaagagcgtattcggatcctggtgtggaacatatacaaacagcaacgcgctgaatggttgtcggtattaaagaactacggcaaagatgcacatctggtgttattgcaggaagcgcagacaacgccagagttagtacagtttgcgaccgctaactatcttgccgccgatcaggtacccgctttcgtgctgccacaacatccttctggcgtaatgaccctttcggcggcacatccagtgtattgctgcccgttacgtgaacgagaacccattttgcgtctggcgaagtcggcactggtgacggtctatccattacctgacacccgcctgttgatggtggttaatatacacgccgtcaacttcagtctgggcgtggatgtctatagtaagcagttacttcctattggcgatcagatagctcaccacagcggcccggtcattatggcgggagatttcaatgcctggagccgtagaaggatgaacgcgttatatcgctttgcgcgggaaatgtcgctgcgccaggtgcgttttaccgatgatcagcgccgtcgggcgtttggtcgcccgctcgattttgttttctaccgtggtctgaacgtcagtgaagcttctgtactggttacgcgcgcttccgatcacaatccgctactcgttgaattcagtcccggcaagcctgataaataaggtatgtcaggtctgccacagggcagaccaacgtttggcgctgcgcaaaacgtgagcgcggtggtggcgtatgacttatctgcccacatgctggatgtcgtggcacaagctgccgaagcccggcaactgaaaaatatcaccacccgccagggatatgccgaaagtctgccatttgccgataacgcatttgatattgttatcagccgttattctgcccatcactggcatgatgttggtgcagcactgcgagaagtgaataggatattgaaacctggcggtaggctgattgtgatggacgtaatgtctccgggtcacccagtgcgcgacatctggttacagacggtagaagcattacgcgatacctctcacgtacgaaactacgccagcggtgagtggttgacgttaatcaatgaagccaatctgatagttgataatttaattacagataagttaccgctggaattttcttcatgggtcgcgagaatgcgtacgccagaagcgttagtagacgctattcgcatttaccaacagagcgcatcgacagaggtgagaacgtattttgccttgcagaatgatggctttttcaccagtgatatcatcatggtagatgcacataaagcggcataaataaaaaaggcaccgggggaatcggtgcctttttattatctggtttgtcaggaatctggcatgttgttgtttttcacaaacaacgtcagcttatcgcctggttgcagattcgcagtgtcgctgttccagcgcatcacatctttgatgttcacgccgtggcgtttagcaatgcttgaaagcgaatcgcctttgcgcacacgatacgtaatgctatcgctgttgtttgccagtcgctgtgcgctactgcctgcaccaatcgtcaaactttggcctggcttcagcttagatccgcgcagtttgttccactgctgcaaatctttggtgcttacgccgagacgtgaagcgatacttgaaagcgtgtcgccagagcgtacggtgtaaacacggctgttaagcggcgtattgtcggcaaccagcgtcgactgtacagcagcaatttcgcctgaagccagagattcacgcagttgatctgcatgcttctttggcaccatcacgtactgcgggccacttgcgcccagcgtggagccttttacgccagcgttgaatgtcttcagcttgctgacggaaatccccgccatatctgctaccttcgccatttcaaccgggctgctcaggtgcacacgcgccagagcacggctttcatcggtcgttggcagacgtacgccataacgcttgctgtttttgagaatatcactcaatgccagcattttaggcacgtactgcttcgtttcctgcggcaacggtaacgaccagaagtccgtggatttcccacgcgctttgttcgttttaattgccttcatgacccgaccttcgccgctgttataagccgctacggtcagaagccagtcgccgtcaaacattttgttcagacgctgcatcatattcagcgcggcagttgttgaagcaacaacatcgcgacgcgcgtcataattgcgggtctgtttcaaaccataattgcgccccgtgctcggaatgatctgccagatgcctgcggcattggcgccagacgttgcgtgaggatcaaaagcgctctccactatgggtagtagtaccagttccataggcatgttacgttttttaacttgccctgctatccagtacatatacggctctgcccgtaaagttacatcgtggagatagctcttattgcgtaaatatttctgtttctgttcgcgaatccggtcattttccggaattcccatctttagctcgtcgccaatgaaagcccacaagtcaccatctggcgcgatagacgtcccatcgtccatccatcgtgcctgacttgtaaactttgctgcttccccttgaccagctgcagaaaggctctgtgcgtgctgttgaacgttgccggtactctggcaacccacgagcaggacagaggcgagtaatatcgcttttgccttcatgtgtgtgtcaatagttgcttaaaagacgaccgatcataacggcgaacggagccgatgacaagaaagttttatcagaacctatctttctttgaccttaaccatgcaaaacgctcttcaggttgttgcaataatgtttcttcattaattacattaattaaatcaatatcttccgttcttaaaaaaacattaatttgccgctcatttttcagaattacgggtagtgttatttgattttttgcccgtaactccttaactttacgataataatcatttatggacaaatcgtgcggaagaatactcaaagcaaacttcatatttgataaggtatattcatgagcacaacataccaatgtatcgtcaggtaacgcacttaactttttaagtgattgatacatttgtgatgctgtcccttcaaacaaccgaccacacccaccagaaaacagtgtgtcgccgcaaaatagataaggtttactgaagtaacagatatgtcctaaagtgtgacccggcgtagcaattacactaaattcatgccccaaaacgaaggcagtttcgccatctttgactacctgtgttgttcccttatcttgtgtctcttgtggaccatacaccacaatttgtggaaacttttccaccagttcttttacgccgccaacgtgatcgtggtgatggtgggtgagaaatatggcctccggttgccagttattggcggcaatggcgtttaatactggctctgcgtctccgggatcgacaatcaggcagcgacctgcttcatcattcaaaacccagatgtaattgtcatcaaaggcgggaatactgttaagattcatagattacctctcagtgtgaaacggaaggttgtgatgaaaccggcaagagtccctcaaactgtcgtggctcctgattgctggggcgatttgccctggggaaagctttatcgcaaggcgctggagcgccagctcaacccgtggttcactaaaatgtatggttttcatctgcttaagattggcaatttaagcgcagaaatcaattgcgaagcgtgcgcggtttctcatcaagtgaatgtttctgcgcaaggaatgcccgtccaggtacaggcggacccacttcatcttccttttgccgataaatccgttgatgtttgtctactggcacatacattgccgtggtgcaccgatccgcatcgtttattgcgtgaagccgatcgggtattgattgatgatggctggctggtcattagtggcttcaatcccatcagttttatgggattacgcaaacttgtgccggtattgcgcaaaacctcgccctataacagccggatgtttactctgatgcggcagctggactggctctctttgttgaattttgaagtgctacacgccagccgtttccacgttctcccgtggaacaaacacggaggaaaactattgaatgcgcatattcctgcgcttggttgcttacaacttattgttgcccggaaacggactattcctttaacgctaaatccgatgaaacagagtaaaaacaagccacgaattcgccaggcggttggagccacccggcaatgtcgtaaaccacaggcttaaacttcaacttggtagcctgtatcttccagtgtgggattcatcgccgcggcacgagccagttcatcacagcgttcgttttccgggtgtccggcatggcctttaacccattcccatttgatttgatgctgccccaatgcagcatcaagacgttgccagagatcgacattttttactggttttttgtctgcggttttccagccacgttttttccagttatggatccactgggtgataccctggcggacatactggctgtcggtactcaaaatgacttcgcaatgttcttttaacgcctccagcgcgacaatagcggccatcaactccatacggttgttggtggtgcgggtgtagccagcgctaaaggttttctcgcgtccgcgatagcgtaaaatagcgccgtaacccccaggtcctggattgcccagacacgaaccatcggtgaaaatttctacctgtttaagcatctctggtagacttcctgtaattgaatcgaactgtaaaacgacaagtctgacataaatgaccgctatgagcactgcaattacacgccagatcgttctcgataccgaaaccaccggtatgaaccagattggtgcgcactatgaaggccacaagatcattgagattggtgccgttgaagtggtgaaccgtcgcctgacgggcaataacttccatgtttatctcaaacccgatcggctggtggatccggaagcctttggcgtacatggtattgccgatgaatttttgctcgataagcccacgtttgccgaagtagccgatgagttcatggactatattcgcggcgcggagttggtgatccataacgcagcgttcgatatcggctttatggactacgagttttcgttgcttaagcgcgatattccgaagaccaatactttctgtaaggtcaccgatagccttgcggtggcgaggaaaatgtttcccggtaagcgcaacagcctcgatgcgttatgtgctcgctacgaaatagataacagtaaacgaacgctgcacggggcattactcgatgcccagatccttgcggaagtttatctggcgatgaccggtggtcaaacgtcgatggcttttgcgatggaaggagagacacaacagcaacaaggtgaagcaacaattcagcgcattgtacgtcaggcaagtaagttacgcgttgtttttgcgacagatgaagagattgcagctcatgaagcccgtctcgatctggtgcagaagaaaggcggaagttgcctctggcgagcataaatacctgtgaaaggcgctaaaaatagcgacttgggcgatttttgcagcaaacgattcaaaagatgagaaaaaccgttgacgaaggtcgaggcaatccgtaatattcgcctcgttcccaacggaacacaacgcggagcggtagttcagtcggttagaatacctgcctgtcacgcagggggtcgcgggttcgagtcccgtccgttccgccactattcactcatgaaaatgagttcagagagccgcaagatttttaattttgcggtttttttgtatttgaattccaccatttctctgttcaatgattttactctggcgtaggtgcgtgattctcgcttgttgtctcattcattaaaattcaataatgatatcgaaccattcagcttaaatatatttctagagaataaatttatattgattaaatgaatgtatatttcaaattgattttgtttgttattatttaagtgaggtatataattagagtccgttatcaatgctaaatattctaatcattatgacaggcgagggagtgtccaattatgaattcaaaaaagctttgttgcatatgtgtgttattctcgctgcttgcaggatgtgcctctgaatcttctattgatgaaaagaagaaaaaagctcaagtcacacaaagtaatattaataaaaacactccccagcaactgacagacaaagatttattcggtaatgaaaccactctggccgtatccgaagaggatattcaagctgcgcttgatggagatgagttccgcgttccccttaattctcctgtaatacttgttcaatccggcaaccgcgcaccggaaaccattatgcaggaggagatgcgaaaatattatactgtttccacattctctggtatcccggacaggcaaaagcctctgacttgtaacaaaaacaaagataaaaatgagaacgaggatgttgccagtgctgagaatatgaactggatgcaggcactgcgttttgtggctgcaaaaggacatcagaaagcgattattgtttaccaggatatgttgcagacaggaaaatatgactctgcgctgaaatcaacagtatggtccgactataaaaatgacaaactcactgacgctatctccctgcgctacctggtacgtttcacgctggtggatgtggcaacaggtgagtgggctacctggtcgccggtgaattatgaatataaagtgcttccaccattgcccgacaagaatgaagccagtacgactgatatgacagagcagcaaatcatgcaacttaagcaaaagacctataaagcgatggtaaaagatttggttaaccgctatcaataataaattatatctgccgccaggaatttctggcggcaataatacaaaattctttgcataagaaatttttcttgacaaagacagtgcaagaaaggacatggaatccggagttaaaaactgtttgttttagaatatttaattatttaactgctgaatcttccttgcgagaaatatatccattattacatttcatgccatttttaatatagattgctcctgggaaaattcccgtattattaccgcaggggtgataattagtattgacatatcctgtgacaaaaggagctattaaaggtgctattacgatagctattagtaaaaatataagagttagctgtattgttatgtctgtggcgaaattgactaccttcgtttttttgattaagaatgattttattatcgtaagtaaaattacatgaatatttaaaaaggaaaacgacatgaaaccgaagcacagaatcaacattctccaatcataaaatatttccgtggagcattttattattgaatatagaggtttaactccggtaaaaaacaaagaagcattgaatgcagggaaaaataatatggccataaaaaacatcgaaagaaactcttttaatttaacatgtaaacgcatggttaatcctcatatcacgggtggagtgttaagaacatacataaatggagtcatgttttcccttttccatttatcaagttcctgttgccgttttagtccatctctaattgcatattttaatttttctgataaatggcattgagcatcgatttcatttaaaacaactgtacacactatccctgtcagtaaaattgctcctccgacaagaattactggaaagccaaagctaacacaggcaaaagaagccagacttccaatagcggttgcaacaccaccggctataactgctttggccacatccattgaaaaatcgccaagaaaattaaccagatctcgctctgaactcataataaattctatggttctgctgatttaaccgcagagaagttcgccacagcaatccgaaaccactggcacgtggagaataagctgcacaggcgtctggacgtggtaatgaatgaagacgactacaaaataagaagaggaaacgcagcagaattattttcagggatacggcacattgctattaatattttgacgaatgagaaggtattcaaggcagggttaagacgtaagatgcgaaaagcagccatggacagaaactacctggcgtcagtccttgcggggagcgggctttcgtagtaataccccgactctccccgtccttaaacacaacccccactcaccacaacctaaactcatccgcatcctgccatgccggaaacttttctctatattcccgcaatgctgccatcgacagctccgcatcaatgcgcgttgcctgatgcgcgtcggcagtagcgataatctctccttgcggattaatcacccggctgtcaccgcgataatggcagccgttgccatcgctgccgacgcgattgcatcccgccacatacgcctgattctcaatcgcgcgggccgtcagcaatgcctgccagtgcagagagcgcggagcaggccagttggcgacgtacagggcgaggtcataatcgttgagattgcgcgaccacacaggaaaacgtaagtcgtagcacaccagcggcaaaatacgccagccgcgccattccacaatcactcgcgcattgcccgctttataatgtagatgctcatctgccatgcggaacagatgacgcttatcataaaaatgtaccgtgccgcccggctcaaccagcaaaaagcggttaaccgaaccagactccgtttgtaatgcaacactgcctgcaatcagcgcattgcactgctgcgccttagctgtcatccagttcactacgtcatcttgtgctagcgacgaagctgccgcttccatggcaaagccgctggtaaacatctccggtagaacgatcacatcgcgcccggtaataccttccagttgacgatcaaaatgacgcaggttggcaggaccatccatccacaccagtggttgctgcaaaagcgtaatcttcaaaccaggcacggtgtacaactcctttatgcgaagggttttataactttaacaccttatcaggcagttgccttagcgcagaataaattgataacaaatgctgatattggaaatatctgatttgcaaattatcgtgttatcgccaggctttaggaggttaataacatgggcaggataagctcgggaggaatgatgtttaaggcaataacgacagtcgccgctctggtcatcgccaccagtgcaatggcgcaggatgatttaaccattagcagccttgcaaagggcgaaaccaccaaagctgcatttaatcagatggtacaagggcataagctgcctgcctgggtgatgaaaggcggtacttatactcccgcacaaaccgtaacgttgggagatgagacgtatcaggtgatgagcgcgtgcaaaccgcatgactgtggctcgcaacgtatcgctgtgatgtggtccgagaaatctaatcagatgacggggctgttctcgactattgatgagaaaacgtcgcaagagaaactcacctggctgaatgtgaacgatgcgctttcgattgatggtaaaacggtgttgttcgcggcgttgaccggcagcctggaaaaccatccggatggctttaattttaaataattagcggataaagaaacggagcctttcggctccgttattcatttacgcggcttcaactttccgcactttctccggcaactttaccggcttcgtcgccagctcttccggatcaaagtcatcaacgttaatactgcgcagacggctttcttcagctttcaccagaatagcggcttcatctttatcaatcagccccttcaccagcgcgttgtgcgccagttcatccagacgggtaaacggcaggtttttacccagctctttacagatccgctgatgaattgggtcggcggcaatcacatccaccagcgcctcttccagcaagccaaccggattatgctcgctcggcgtcaggtactgaccgcgaccaatgcgggaacgggtggcgttcggcacttgtaaaatcttcgccactttatgatccagcttgtcagaaggtgccagataatgacgtccggtcgggaagatcaccacattcagcagcccggcaaccacgcggttcgggaagttttgcagtaaatcatccatcgcctgttcagcctgatacagcgcatcttgtacgccccagtgcaccagcggcaggtcggcttcattacggccttcgtcgtcataacgcttcagcacggcagaggcgaggtagagctggcttaaaatatcccccagacgggccgagatgcgctcgcgacgtttcaggctgccgcccagcactgccatcgagacatcagaaagcagggcgaggttggcgctcaggcggttcaggtgctgatagtagcgtttagtggcatcgccggttggcgtgctgctggttaaaccgcgcgtcaggcccagccagaagctgcgaactttgttgctaccgacgtgaccgatatgtttgaacaacagtttatcgaacgcgttgacgtcattgttcttcgccgcttccatctcttccagcacgtacggatggcaacgaatcgctccttgtccgaagatcatcatgctgcgggtcagaatgttagccccttcaacggtgatggcaatcggtgcgccctggtaagcacgcgccaggaagttgctttgcccgagcataatgcctttaccgccggtaatatccatcgcatcaataatcgactgctgcccgcggtgggtacagtgatacttaacgatagccgacagcacggcaggtttttcgccgagcataatgccgtaggtaatcagcgatgccgcagcatccatcacgtaggcattaccggcaatacgcgccagcggctcttcaatcccttccatcttaccaatagagattttgaactgacggcgaatgtgagcatacgcgccggttgccagcgctaccgatttcacgccgccggttgagttggaaggcagggtgatgccgcggcctaccgagaggcactccaccagcatccgccagccttgcccggccattttcggcccgccgatgatgtaatcgatcggcacgaagacatctttaccgcgcgtcggtccgttctggaacggtacgttcagcgggaagtggcgacgaccaatttccacgcccggcgtggtggttgggatcagcgcacaggtaatgcctaaatcttctgcaccgccgagtaatttttccgggtcggagagtttaaacgccagcccaagcacggtcgcaatcggtgccagcgtaatgtagcgtttgttccaggtcagacgcatccccagcacctgctggccctgccattcgcccatgcagacaatcccggtgtccggaatcgcgcccgcatcggaacccgcttccgggctggtcagtgcaaagcaggggatctcctgaccacgcgccagacgcggcagatagtgatctttctgctcgtcagtgccgtaatgttgcaacagttcgcccgggcctaatgagtttggcacgccgacggtaatcgccaggatcccgctcacgccggagagtttttgcagcacgcgagactgggcataagccgagaactccagcccgccgtactcttttttgatgatcatcgcgaagaaacgatgctctttaaggtacgcccacaactccggcggcagatccgccagctcatgggtgatctggaaatcattcgccatccggcaggcttcttctaccgggccgtcgagaaacgcttgctcttcggcggtcaggcgcggctgcggatagttatgcagctttttccagtccggcttgccctggaacaagtcgccctcccaccaggtggtgcccgcatcaatcgcttctttctcagtgcgcgacatcggcggcatcaccttacggaaaccgcgaaataccggcgcggaaatcatcgacttacgcataggcgcaaagttaaatggcacgaggataatggccagaggcaccagtacccacgccgaccacagaccagcaacgccgagggcggctgtccaggcgagcaaaatcagactgctgataaataagctcacgcggtgatagaacaacgcgccgagcaggacaaccgtagcgagaatactcaaaatcatcataacgaaaagccccttacttgtaggaggtctgaccacttgtgatgatatggttgtagtggatgtaaaaacatttagcaatatgtttacaatataattacaacaaagctcacattgttgctgtttttatccgcacttcaggtcaaaaagtcctggtcatagcacctgcccgtacttctcgcttttggcggtatccggtacactgcattttgtctattacatttatgctgaaggatatcctcatgtaccaggatcttattcgtaacgaactgaacgaagcggcggaaacgctggctaactttttaaaagatgacgccaatattcacgccattcagcgcgcggcggtcctgttagcagacagctttaaagccggtggcaaagtgctttcctgcggcaacggcggttcccattgcgacgctatgcactttgccgaagagttgaccggtcgctaccgtgaaaaccgtccgggctacccggcgattgctatttctgacgttagtcatatttcctgcgtcggtaatgatttcggtttcaatgatattttctcccgctacgttgaagcggtaggtcgcgaaggcgatgtactgctggggatctccacctccggtaactctgcaaacgtgatcaaagcgatcgcagcggcgcgtgagaagggaatgaaagtgatcaccctgaccggtaaagacggcggcaaaatggctggcacggcggatatcgaaattcgcgtaccgcactttggttatgccgaccgcattcaggagattcacattaaagtgatccatatcctgatccagttgattgaaaaagagatggttaagtaagtctggcgtaggccggataagacgtttacgccgcatccggcatttgtgcgctgatgcctgatgcgacgctgacgcgtcttatcatgcctacaaatctgtacgcgaaccgtaggccgaataatgcgttcacgccgcatccgacctgaaaattcttaaatcaatcttcgccgggggccatgcgctcccgctgttgtggaggttacccatgtgcgaattgctcgggatgagcgccaacgtccctaccgatatctgctttagtttcaccgggcttgtacagcgtggtggtggaaccgggccacataaagatggctggggcattaccttttacgaaggtaaaggctgtcgcacatttaaagatccacaacccagctttaattcccccatcgccaaacttgtccaggactacccgataaaatcctgttcggtggtggctcatattcgccaggctaatcggggcgaggtggcgctggaaaatactcacccatttacccgcgagttatgggggcgtaactggacttatgcccataacggacaactgacgggctacaaatcactggaaaccggcaacttccgcccggtaggcgaaaccgacagcgaaaaagccttctgctggctcctgcataaattaacgcagcgttacccgcgcacaccgggcaacatggcggcggtatttaaatatatcgcctcactggcggatgaactgcggcagaagggcgttttcaacatgctgctttcggacgggcgctatgtaatggcgtattgctcgactaatttacactggatcacccgccgcgcgccgtttggcgtggcaacgttgctggatcaggatgtggaaatcgacttcagctcgcagaccacaccgaatgatgtggtcacggtgattgcaacacagccgctgacgggcaatgaaacctggcaaaagattatgccaggcgaatggcgcttattttgcctcggggagcgtgtagtttgatgccagttgtggctgcacaacttcgtggcttaacggcttgctgaccacgtaacgaccattgaccacagaaacggttggtggcttacgggtttgctcaaagtagtcgtaacccggcttcagttgctcccagaagtccttaaagttggaatatttatggcgcttcatattggcgtcggtcatgcggaacgggtaaatactcacttgcacgctcggctgaccaaacaccagcgcaccagtaacgaactggaatatctcatcaataccctgattggtcattgcgtagcagccgatggaaacacaatcgccgtggatcatcaggtatttcccttcataaccatgcgcacggtcataggcattggggaaaccaatattaatcgctttgtagtaacggctgtctggttttaactgattacgctggacgctataaaacccttccgggcttttgaaatcgccctgacgctgttttggccctaagccgccggaatatttacagattttatagctgtcgagcagttgatattgctcgcccattttgacgtagagatcgagcgtacgttcttccttgaagatctggatgtagacaggggatcccatcaactgctgcttatactctttgctcacaggcgtggtagagctactgctgcccagcaaaccggcaaatgaaacgcacgggatcaacaacatcgcaagaattaatgcgattttacgcatactgcttattccttgataaaacggttacacacgccaggacggcaaaatggatcccaaatcggaatagtctggatttggaaggctcacattatcaccaaaagagttttacgcaagcctgtcggcgcagggtttacaaatttcatcggaagcgggctttacccaaagagcgccgcgtgagttccagttctctcaaatcgtaaaagtttatcggtaagtttgtaaatcaggatccagtccggttcgacatgagcatcgcgataacctttccatgaaccttgcagcgggtggtctttataaacagctggaagcggtaaagtattattgataagaagcgtcataagatatttcaatttattcatatccttatgacgcttttgtgcaagttttacatcctttgaatattgtcccgagtattcaatatccctttgaatcatatttaaattcctaatttatcaaataaatcatcggcgtctttggccttatgaacatcaatgccagcttcgctgtttttgattgattgaatggttaattgattaggctcgcgtaaatcaaacggcaatgccttttcacgcgcgacctttgtgagggttatgcgaaccaggtcagagatggtcagccccatcccggccagtacgtccgctgcctgattcttcagatcttcatcgattcgggcgcgaacaaacgcgttagcagccattggggtatctcctgtgctgtatatttattcagcttgaattgtagctcaaatgagcaacagcgacaatccatgagtaatttaataaacggatgtttttacataattaactgaaatatatatgttaattttataataatggtttattaagtttgttcagaaacgatccgggatacactgcaacattaaagcatgaccagccattattgagtatgtccttgccgtcgattccatcctttgtattgtcgggattactgttgatttgtttgccgttttcttcatttgccagcgccaccacatcacatatctctttcagctacgccgcccgccagcggatgcaaaaccgtgcgcgtttattaaaacagtaccaaactcatctgaaaaagcaggccagctatattgtggaaggcaatgccgaaagcaaaagggcgctacgccagcacaaccgggagcagataaaacagcatccagaatggtttcctgctccgctcaaggcgagtgacagacgctggcaggcgctggcggaaaacaaccactttttaagcagcgaccatctgcataacattaccgaagtggcgattcaccgcctggagcagcagcttggcaagccttacgtctggggcggtacgcggcctgataaaggctttgactgtagcgggttggttttttatgcctacaacaagatccttgaggctaagctcccgcgcacggccaatgagatgtaccactatcgccgggcaacgattgtggcgaacaacgacctgcgccggggagatttgctgtttttccatatccacagccgcgagatagccgatcatatgggcgtgtatttgggcgatgggcaatttatcgagtcgccacgtaccggcgaaaccattcggataagccgattagccgaacctttctggcaggaccattttttgggcgcgcgcaggattttgacggaagagacgattttgtaggacggataaggcgtttacgccgcatccggcagttgtacgcaggtgcctgatgcgacgctggcgcgtcttatcatgcctacgagcccgcgaatatttgcgagccgctttcccgatataaaacaacctcattgccaacctttccttttcttcttaccgttgagaaaaaggagtcgccatgtctgaatatcgtcgttattacatcaaggggggaacatggtttttcacggtgaatttacgaaatcgtcgaagccaacttttgaccacccagtaccagatgctccgtcacgccattattaaagttaagcgagacaggccttttgaaatcaacgcctgggtcgttttgccagagcatatgcactgtatctggacattacctgaaggcgatgatgatttttcctcgcgctggcgggaaattaaaaagcaatttacccatgcttgtggattgaaaaatatctggcaaccacgtttttgggagcacgccatccgcaataccaaagattataggcatcatgttgattatatttatataaatccagtaaagcatggttgggtaaagcaagtgagtgattggccattctcaacgttccatcgcgatgtcgcgcgagggttatatcccatcgattgggcgggggacgtaacggattttagtgccggggagcgtatcatttcataattgtgcgcagatgcctgatgcgacgctagcgcgtcttatcatgcctacaaacttgtgccggatcggtaggccggataaggcgtttatgccgcatccggcagttatgcgcagatgcctgatgcgacgctggcgcgtcttatcatgcctacaaacttgtgcctgaacggtaggacggataaggcgttcacgccgcatccggcagttgtgcaccaatgctggatacttacatcaacgcccccataatcttcaactccagctcatccggcacttcgttatacgacagcacatgcagccccggcgcaaacaaccttgcataacgcgccagcaaagggcgcagctgcggtggcaccagcagcaccgggtctttccccgccgctttcatctgctctttcacctgtggcatcgtactctggaactggttgagcatattcggatcgaccggcacgctgtcgagcatcactttcccgccctgttgcgcctgattcaccacgttggtcagcagattttccagctcattattcagcgtatacaccgtcagctcctgcttgcgaacgaacggatgggtaatgctgcgccgcaatgccaggcgcacatcggccgccagcagaatatgatctttcgtcaccgtgctactggcgaccagcacggtggcgatggtgacgatatcgcgcagggaaacgccttcggtcagcagcgcccggtacactttcagcaactggctgtaattgagcgccgcgctcaaatcttccgccagacgcggtgccgtcgacgataaacggttatgcaactgcgtaatatcatcatagttaaacaaatcaggaatatagctgcgcacaatcttatttacatgggtagcgatcacgctggcgctgtcgatcacctgataccccatattcagcgccttcgctttctgcgccgcctggatccaggtgaccggcatcccgtacgccgggtcgttcccctgcacgccgtcaatctcgccgtaggtttcgctggagggcagggccatcagtttatccgccggaatatccgcttcatcagcctttatgccgttgatgaaaatggcgtactgactgggcttaaggcggaagttttcccgaatgcggatctccggcagcagcacgccgttgccgtcagaaatcacctgccgcacgccgcgaatccgctgggtgagcgggttaccctgtgctttgtccaccagcgccaccagtttgtaaccgaggcttaaactgataggctcgatcagcggaatggtttcccaactgacctgctgctcgctggtttcggtgatggtgcgggtcagcgtttcgaggcttttctcttccgcctccgccgccagcggctgtttgctcatccgccagccggtaaaaccaagcagggcgctgaacagcaaaaacggcaggtgcggcattcccggtaccaccgccagcacgaacataatcccggtggcggtgtagagcaccgacgggcttgccagcagctggttacgcacgtcatgggcgatatcgccgttgtcgctgacgcgggtgacgataatcgccgccgcggtggagagcagcagggaagggatctgcgccaccaggccgtcgccgatggtcatcagcacatactgctggaaggcagcatcggcgctcaggttgtatttgaagatcccgatacagacgccgccgatcaggttgatcgccagaatcatcatcccggcgatggcgtccccgcgcacaaacttcgatgccccgtccatcgcgccgtagaaatcggcctcgctggcaacatctttacgccgggtttgcgcctgcgcctggttgatcaatccggcgttaagatcggcgtcaatcgccatctgtttgccgggcatcgcgtctaaggtaaagcgggcagaaacctcggaaatacgctcggcccctttggtgacgacaataaagttgattgtcaacagcgtcagtaaatccgagcgtgaaagcattatcgccgcgctgcacgggcagtcgatttttaacggtggtgggctgtcgccgttaaataaaatcagcccgtctcatccgccaaaacctgccaccgtggcggtgccggaagagacggagaaaaaagcgcgtgatgtgaatgagaaaacggcgctgctgaagaagaaatccgccaccgagcttggtgagctggcaaccagtatcaacaccattgcccgtgatgcgcatatggaagcgaatctggagatggagattgttccccagggattacgcgtgctgattaaagacgaccagaaccgcaatatgtttgaacgcggcagcgcgaagattatgccgttctttaaaacgctgctggtggagctcgcgccagtgttcgactcgctcgataataaaattattattaccgggcataccgatgcgatggcctacaaaaacaatatctacaacaactggaacctttcgggtgaccgcgcgctttcggctcgtcgggtgctggaagaggccggaatgccggaagataaagtgatgcaggtaagcgcaatggcggaccagatgctgctggattccaaaaatccgcaaagcgcgggcaaccggcgcattgagattatggtgctgaccaaaagtgcgtccgatacgctgtatcaatactttggtcagcatggggataaagtggtgcagccgctggtgcaaaagctggataagcagcaggtgctttcgcagcgaacgcgttaaatgctgaatctttacgcatttctcaaaccctgaaatcactgtatactttaccagtgttgagaggtgagcaatgcgtaaaatcattcatgtggatatggactgctttttcgccgcagtggagatgcgcgacaatcccgccctgcgcgatatccctattgctattggcggcagccgcgaacgtcggggggtgatcagcaccgccaattatcccgcgcgtaaatttggcgtacgtagcgctatgccgacagggatggcgctcaaattatgcccacatctcaccttgcttccggggcgctttgacgcctacaaagaagcctcaaatcatatccgtgaaatcttctcgcgctacacctcgcgcattgaaccgttgtcactggatgaggcttatctcgatgtcaccgatagcgtccattgccacggttctgcgaccctcatcgcccaggaaatccgccagacaatcttcaacgagctgcaactgacggcgtctgcgggcgtggcaccagtaaagtttctcgccaaaatcgcctccgacatgaataaacccaacggccagtttgtgattacgccggcagaagttccggcatttttacaaaccttaccgctggcaaaaatccccggcgtcggcaaagtctcagcggcaaaactggaagcgatggggctgcggacctgcggtgatgtacaaaagtgtgatctggtgatgctgcttaaacgctttggcaaatttggccgcattttgtgggagcgtagtcaggggattgacgaacgcgatgttaacagcgaacggttgcgaaaatccgtcggcgtggaacgcacgatggcggaagatattcatcactggtctgaatgtgaagcgattatcgagcggctgtatccggaacttgaacgccgtctggcaaaggtaaaacctgatttactgattgctcgccagggggtgaaattaaagttcgacgattttcagcaaaccacccaggagcacgtctggccgcggctgaataaagctgatctaatcgccaccgcgcgtaaaacctgggatgaacgccgcggcgggcgcggtgtgcgtctggtggggctgcatgtgacgttgcttgacccgcaaatggaaagacaactggtgctgggattatgatgtatactattatgtatattctggtgtgcattattatgagggtatcactgtatgcatcgaattctcgctgaaaaatcggtcaatatcactgagttacgtaaaaacccagctaaatactttattgatcaaccggttgcggttctttctaataatcgccccgcaggatatctcttaagtgccagcgcattcgaagcgttaatggacatgcttgctgaacaagaggagaaaaagcccataaaggcgcgcttccgtccaagtgctgcaagattagaggaaattacacgccgcgctgaacaatatcttaatgatatgacggatgatgatttcaatgactttaaggaataaggatgcgggtattcaaaacaaaacttattcgcctgcaacttacagcagaggaacttgatgcgttaacggcggattttatttcctataagcgtgacggtgttttgccagatatatttggtcgcgatgcactctacgacgactcctttacctggccattaatcaaatttgagcgagttgctcatattcatctggcaaatgagaataatccatttccgccacagttgcgccaattcagcagaacgaatgacgaagcgcatttggtatattgtcagggggcgtttgatgagcaagcatggttgctcattgccattctgaaacctgaacctcataaactggctcgagataacaaccaaatgcataaaattgggaaaatggcagaagcgtttcgcatgcgtttttgaatttatattatgaataacatacaaataagaaactatcagcctggcgattttcagcaactatgcgctattttcattagagcggttacgatgaccgccagtcagcattattcaccacaacaaatttccgcctgggcgcagattgacgaatctcgctggaaggagaaactcgcgaaatcacaagtgtgggttgcgatcattaatgcacaaccggttggttttatttcccgcattgaacattatatcgatatgttatttgttgaccctgaatacacccgccgtggggttgccagcgctttgttaaaacctttgattaagtctgaatccgaacttacggtggacgcaagcataaccgcaaaacccttttttgaacgttatggttttcagacagttaagcagcagcgcgttgaatgccggggagcgtggtttactaatttttatatgcgatataaaccgcaacattaaatccagcttgcaatgaaaataacgcccgcctggtatgtgcgcgttttctgattccacaaactgcaaggaggtaaatcatgacaaatcctttatcaatgactctttgcagacctttccaggattaattctttttttcttgccctggattcgtctgccatttcctgatttttatatttatatactctaaataattcgagttgcaggaaggcgacaagcgagtgaatcgccaggagcttacataagtaagtgactggggtgaacgaacgcagtcgcagtacatgcaacttgaagtatgacgagtataaatggaatggtacatgggcaaatatattcgtcccttatccgatgcggtatttaccatcgcatctgatgacctgtggatcgagagtttagcgatccaacaattacacaccacggcaaatttacccaacatgcagcgcgtagtggggatgccagatttacaccccggacgcggctacccgattggcgcagcgttcttctctgttggtcgtttttacccggcaagacgtcgcggtaacggtgctggaaacagaaacgggccgctactctgacacactgcgttcggcgctggtttctctcgatggcgataacgcatgggcattaagcgaaagctggtgtggcactattcagtggatttgtccgagtccgtatcggcctcatcatgggcgcaaaaactggtttctgggcattgggcgttttaccgctgatgagcaggaacaatcggatgcaatccgttatgagacgctgcgttcgtcggggccgggcggtcaacatgtcaataaaaccgactcggcggtacgcgccacgcatttggcatccggtattagcgtgaaggttcagtcagagcgtagtcagcatgctaacaagcggctggcacgattgctgattgcctggaagctggagcaacagcaacaggaaaatagcgcggcgctgaaatcgcagcggcgaatgttccatcaccagattgaacgtggcaacccgcgacggacatttacagggatggcttttatcgaaggataatgaaggatgaaactgccggaaggcgattaaacgccatccggcagcaaatcaaataattacttcgccggaatttctttcagcagttcagtcagcagtgtccagtaatgacctacgctttcgatgtgaacttgctcatccggagagtgtggaccggtgatagttggcccgatagaaaccatgtccatttccggatacggttttttgaacagaccacattccaggcccgcgtggataatctggatgttcggcgtcttgttgaacaggcgctgataggtttcacgtaccagatgcatcaccggagaattagcgtccggctgccagccaggatatgcgcctttcgcttcggttttcgcgccagccagtttacccagcgaatccagcatgctcaccacgtagtctttaccgctgtcgatcagtgaacggatcaggcagtgaatttctacgttattgtcagtcatggtcaccacaccgacgttcagggaggtttcaaccacacctttggctacatcggagttacgaatcacaccgttcggggtggcgttcagcagacgaataaaggtatcgcgagatttcgcaatcagggcagctttatcgttcgctacagagtccagcaacaaggccagatttttctctttttctgccagctcgtttttcaggatctcctgataggtattcaccagagatttcaggacgtcgactttatcagctgcgacagcaatggtcgcaaaggcttcacgcgggatggcgttacgcagtgtgccgccgttgaaatcgataaggcgcagatccagttcttccgcatgacccgccaggaagcgcaccagcagtttgttggcattacccagcccaacgtggatttccccgccggagtgaccgcctttcagaccttttaaggttaacttgaaggtttcaaaaccagctggaaccgcttcacgatctaaatgcaggttggaggtgaagtcgataccccccgcacaacccatgtagatttcaccttcttcttcggagtcggtgttaatcagaatatcagcctgcaaccagttgccctgtaagccgaacgcaccgtccataccggcttcttcggtcatggtcagcagcacttccagcgggccgtgaaccacgttttcgtcagccagaaccgccagcgcagaggccataccaatgccgttatccgcacccagcgtggtgccgcgcgctttaacccattcgccatcaatataaggctggataggatctttcgtgaagtcatgcacggtgtcgttatttttctgcggcaccatatcgaggtgggcctgtaagacgaccggtttacgattttccatacctgcggtagcaggtttacgaatcaggatattacctacctgatcgcgttcgacatggaaacctttctcttttgcccaaccaacaatgtattcagcgagttgctcttcatgataggacgggtgaggaatagaacagattttggcaaaaatatcccacagcggctgtggagataattgagacagttcagacacgttaagtctccttgtcgatcacccgcaaaacagtattgcaggtcacagggttagcagaaaatgttgtcaacacaagacaggcttgcgagatatgtttgagaataccactttatcccgcgtcagggagaggcagtgcgtaaaaagacgcggactcatgtgaaatactggtttttagtgcgccagatctctataatctcgcgcaacctattttcccctcgaacactttttaagccgtagataaacaggctgggacacttcacatgagcgaaaaatacatcgtcacctgggacatgttgcagatccatgcacgtaaactcgcaagccgactgatgccttctgaacaatggaaaggcattattgccgtaagccgtggcggtctggtaccgggtgcgttactggcgcgtgaactgggtattcgtcatgtcgataccgtttgtatttccagctacgatcacgacaaccagcgcgagcttaaagtgctgaaacgcgcagaaggcgatggcgaaggcttcatcgttattgatgacctggtggataccggtggtactgcggttgcgattcgtgaaatgtatccaaaagcgcactttgtcaccatcttcgcaaaaccggctggtcgtccgctggttgatgactatgttgttgatatcccgcaagatacctggattgaacagccgtgggatatgggcgtcgtattcgtcccgccaatctccggtcgctaatcttttcaacgcctggcactgccgggcgttgttctttttaacttcaggcgggttacaatagtttccagtaagtattctggaggctgcatccatgacacaggcaaacctgagcgaaaccctgttcaaaccccgctttaaacatcctgaaacctcgacgctagtccgccgctttaatcacggcgcacaaccgcctgtgcagtcggcccttgatggtaaaaccatccctcactggtatcgcatgattaaccgtctgatgtggatctggcgcggcattgacccacgcgaaatcctcgacgtccaggcacgtattgtgatgagcgatgccgaacgtaccgacgatgatttatacgatacggtgattggctaccgtggcggcaactggatttatgagtgggccacccaggcgatggtgtggcaacaaaaagcctgtgcggaagacgatccgcaactcagtggtcgtcactggctgcatgcggctacgttgtacaacattgccgcctatcctcatctgaaaggagatgacctggccgagcaagcgcaggctttgtcaaaccgcgcctatgaagaggccgctcagcgtctaccgggcacgatgcggcagatggagtttaccgtacccggcggtgcgcccatcaccggctttttgcatatgccgaaaggcgatggcccgttcccgacggtattaatgtgtggtggtctggatgcgatgcagacggactattacagcctgtatgaacgttattttgcgccgcgcggcattgcgatgctgactattgatatgccgtcggtgggcttttcttcaaaatggaagctcacccaggactccagcctgttgcatcagcacgtcttaaaggcgctgcctaacgtaccgtgggtggatcacactcgcgtcgcggcctttggtttccgtttcggcgctaacgttgccgtgcgtctggcataccttgaatcgccgcgtctgaaagcggttgcctgtcttggtccggtagttcataccctgttgagtgattttaagtgccagcaacaggtgccggaaatgtatcttgacgttctggccagtcgtttggggatgcatgatgcttccgatgaagcgttgcgcgtggagctgaatcgctattcattaaaagtgcaaggattgctgggacgtcgctgcccaacgccaatgttatcaggctactggaagaacgatccgttcagcccggaagaggactcacgcttaatcacctcatcatctgctgacggtaaattattagagatcccatttaacccggtgtatcggaattttgacaaaggtcttcaggaaatcaccgactggatcgaaaaacgcttgtgttaaaaatttgctaaattttgccaatttggtaaaacagttgcatcacaacaggagatagcaatgacgttaccgagtggacacccgaagagcagattgatcaaaaaatttaccgcactaggcccgtatattcgtgaaggtaagtgcaaagataatcgattctttttcgattgtctggctgtatgcgtcaacgtgaaaccggcaccggaagtgcgtgaattctggggctggtggatggagctggaagcgcaggaatcccgttttacctacagttaccagtttggtctgttcgataaagcaggcgactggaagagtgttccggtaaaagacactgaagtggttgaacgactggagcacaccctgcgtgagtttcacgagaagctgcgtgaactgctgacgacgctgaatctgaagctggaaccggcggatgattttcgtgacgagccggtgaagttaacggcgtgagtgaaatgtgccggatgcatcacatccggcaatattcattaaaactgatacgtcatgccaaccgcgacaatatcatcattattaatattcaatttgttatcgctatccagttggttgattttataatcaacaaacgctgacatatttttgttgaaataatacgtagcaccgacgtcgatataattgaccagatcttcatcaccgataccttcaatatctttccctttcgataagacataacccagcgatggacgcagaccaaagtcaaactggtattgagcgaccgcttcaaagttctgtgtcttattggcaaagccgccagttattggcgtcattttgcgtgtttcagaatagaaagttgccagataaatattattggcatcgtatttcagacctgttgcccatgcttctgcacgcttgcctgtgccacggctttgcaggttctgctcgttggtgcgatctgagttggtataggccccactaatggcgaaatcgctgccgccaaagtcatatgtcaatgacgtgccgaagccatcgccgttttgctttttaacgtcgcggttttcgtttttcccttgatattgcagggttaagttcaggccatcgataacgccgaagaagtcggtgttccgatacgtcgccagaccgctggcgcgtttggtcataaagttgtcggtctgcgccgaggaatcgccaccaaattccgggaacatatcggtccaggcttccacgtcatacaacgcccccaggttacgaccataatcgaaagaacccaaatctttatatttcaacccggcaaaagcgagacgcgttttttgctgtgcagtatcactctctgctttattaccggcaaactctgcttcccaacgaccataaccagtcagttgatcgttaatttgtgtttcgcctttgaaaccaaaacggatataactctggtcgccatctttactggcgttatcactcatataatgcatggctttaactttgccatagacatccagtttattaccgtctttattatatatttctgcagcctgtacagatgcagatgccacaatgcccatcaccactaatgccagagtgctctttttcattttcattcctgattttaattaacgcgcgaatattcagcgggagagtcccgttgaaaacaggaaagtttttaacctgagattgttaaagatatattacagattaataatattcttaaaatgtggtaatttattaaatctgtaataaaagcgtaaacaactgccgctaggcttgctgatcccgcgcaacaaaacgccatgctttgctcgcagatggttggcaaccgacgacagtcctgctaaaacgttcgtttgatatcatttttcctaaaattgaatggcagagaatcatgagtgacagccagacgctggtggtaaaactcggcaccagtgtgctaacaggcggatcgcgccgtctgaaccgtgcccatatcgttgaacttgttcgccagtgcgcgcagttacatgccgccgggcatcggattgttattgtgacgtcgggcgcgatcgccgccggacgtgagcacctgggttacccggaactgccagcgaccatcgcctcgaaacaactgctggcggcggtagggcagagtcgactgattcaactgtgggaacagctgttttcgatttatggcattcacgtcgggcaaatgctgctgacccgtgctgatatggaagaccgtgaacgcttcctgaacgcccgcgacaccctgcgagcgttgctcgataacaatatcgttccggtaatcaatgagaacgatgctgtcgctacggcagagattaaggtcggcgataacgataacctttctgcgctggcggcgattcttgcgggtgccgataaactgttgctgctgaccgatcaaaaaggtttgtataccgctgacccgcgcagcaatccgcaggcagaactgattaaagatgtttacggcattgatgacgcactgcgcgcgattgccggtgacagcgtttcaggcctcggaactggcggcatgagtaccaaattgcaggccgctgacgtggcttgccgtgcgggtatcgacaccattattgccgcgggcagcaagccgggcgttattggtgatgtgatggaaggcatttccgtcggtacgctgttccatgcccaggcgactccgcttgaaaaccgtaaacgctggattttcggtgcgccgccggcgggtgaaatcacggtagatgaaggggcaactgccgccattctggaacgcggcagctccctgttgccgaaaggcattaaaagcgtgactggcaatttctcgcgtggtgaagtcatccgcatttgcaacctcgaaggccgcgatatcgcccacggcgtcagtcgttacaacagcgatgcattacgccgtattgccggacaccactcgcaagaaattgatgcaatactgggatatgaatacggcccggttgccgttcaccgtgatgacatgattacccgttaaggagcaggctgatgctggaacaaatgggcattgccgcgaagcaagcctcgtataaattagcgcaactctccagccgcgaaaaaaatcgcgtgctggaaaaaatcgccgatgaactggaagcacaaagcgaaatcatcctcaacgctaacgcccaggatgttgctgacgcgcgagccaatggccttagcgaagcgatgcttgaccgtctggcactgacgcccgcacggctgaaaggcattgccgacgatgtacgtcaggtgtgcaacctcgccgatccggtggggcaggtaatcgatggcggcgtactggacagcggcctgcgtcttgagcgtcgtcgcgtaccgctgggggttattggcgtgatttatgaagcgcgcccgaacgtgacggttgatgtcgcttcgctgtgcctgaaaaccggtaatgcggtgatcctgcgcggtggcaaagaaacgtgtcgcactaacgctgcaacggtggcggtgattcaggacgccctgaaatcctgcggcttaccggcgggtgccgtgcaggcgattgataatcctgaccgtgcgctggtcagtgaaatgctgcgtatggataaatacatcgacatgctgatcccgcgtggtggcgctggtttgcataaactgtgccgtgaacagtcgacaatcccggtgatcacaggtggtataggcgtatgccatatttacgttgatgaaagtgtagagatcgctgaagcattaaaagtgatcgtcaacgcgaaaactcagcgtccgagcacatgtaatacggttgaaacgttgctggtgaataaaaacatcgccgatagcttcctgcccgcattaagcaaacaaatggcggaaagcggcgtgacattacacgcagatgcagctgcactggcgcagttgcaggcaggccctgcgaaggtggttgctgttaaagccgaagagtatgacgatgagtttctgtcattagatttgaacgtcaaaatcgtcagcgatcttgacgatgccatcgcccatattcgtgaacacggcacacaacactccgatgcgatcctgacccgcgatatgcgcaacgcccagcgttttgttaacgaagtggattcgtccgctgtttacgttaacgcctctacgcgttttaccgacggcggccagtttggtctgggtgcggaagtggcggtaagcacacaaaaactccacgcgcgtggcccaatggggctggaagcactgaccacttacaagtggatcggcattggtgattacaccattcgtgcgtaaataaaaccgggtgatgcaaaagtagccatttgattcacaaggccattgacgcatcgcccggttagttttaaccttgtccaccgtgattcacgttcgtgaacatgtcctttcagggccgatatagctcagttggtagagcagcgcattcgtaatgcgaaggtcgtaggttcgactcctattatcggcaccattaaaatcaaattgttacgtaagatcttatcattctcccaccaaaaaattatcttaatgtaacagctggtgtaagtaaattctatcaacgaagatcaatcttatctactgaccaaaaaggcctgatagggcttcgctcactatacatccttggctgcaggtttagttgtacaccactcctaaatttaatgtgttggcaatgtgttcaataaagctcgaacaaattagctcattatgatcggttaatacttcaacttctggttgcatgattgtttgtccgtaaaaagataacgcgcctgccgggtagtagcaggcgcattacgcaataggtaaacaagggaggaagttcagaaatgtaaatcgggaaggttgtacgcaatgttcatcgtactacgttgttacggctttgccgcaacaagccagttgcctgccgcgctcgcagaatgtctgcagcccggagataaggagattgttcctgccagctaaatcccttcctgtcgatacgaaccagctcgtatttttctaccagaaaattcacggcatcggctagggtgataccggcatcgatgtgttccttaatcacagcctcattgcagaatggcgtgtcgtttattgtcagaccatagtgctgttccagcagacgtgtcagtaacatttgccagacagccacgggtgacaggcagggcttcaccgcccgctgagttattgcaggtaaagttttcatgtttgctctcgtgtaggtaattaacgctgagtggggtaaatggcgatgtatacgtagccgcaactgccaagggtgtcggcttcgcaggttaaatcgttgtggtacagggtaacgcagtgggcatggtgggggctgagttcaccggtggtcagcatcgattccatctggaggataaagtgcgggaatgtttcatccagcttccggcattcgatgtcactgaacttgccggtgatgctggcccggtcagccagataatgcagtcggttgccttcctgcaccagacgggctcccaggcgcagtgtaatctcccgctgcaggcccctggtagggttgctcattacagttctccactattgtcagttcagggtgatgctcatcaggcaggtatagggcccattgcggtcctggcggcgttcggcgtataccgcgaggactccggcgatatccggaacgtccctgccggtgtaatgacagacgctaccgtgccactggtatttgccggtgcagtagcgaaagattcgggactcaggatgctggcggtatatcgtcattgccctgcgtttactgataattttcatgtaatacctcaaagcagaccgtgttctgcgaacgaatagatttgcctgccaccgacaatcagatggtcagggacacggatatccaccagctgaagcacctgaaccagtcgctgcgtgagggttttgtcggcctggctaggtgtcgtctcgccggaaggatggttatgcgcgagtatcaccgccgccgcgttgaagtgcagagcacgtttgaccacctcccggggatgcacctcggtgcggttaatcgtgccggtgaagagcgtttcatgggcaatcaactgattctggttgtccagatacaacacccggaactcttcccgctcaagcgcggccatatgcagtcgcagccattcacgtacggcgtgggtagaggtgaaggctacgccgggctcatgcaggtggcggtccagagccctgagcgcccgctgaatgagacgccggtcctgtggcgtcatctcgccgggtaaaaaggaaagctgtttcatctgttgctccttcggtcagtcgataatacgcagaatggcgtgagcctctggatgttgcatggcatactcccgcaggcggtaatagtgtgcggtcatcgcgtcacattctgtacggcaggcatggtggctatacgcaatcaggcagacagcaatacctgctgcttctgcactcatttgggcatcgttaccgttcaggcagttaaacagacgccatgtctcatcgttgtcaggctcgggggacataaatgcgccgccattgctgagggtgtagaacgaccagataccaccgctgtagccctcacagaagcggtccatccaggcgaagatatgcggctccaggagtagccactgcgggatagcgccaaagtactgtggccagaaatcgatacgctgttcatcggggaccggcgtgacggtcagttcaaattcgggttggttagcgggtgcgaggtcgtgctgcgtctgtgttgtcatgggtatgtctccgtcaataaaaacgccagcggcgatggctggcgtatggggatataaagtgtgttcggggaggtgaatgcgggtaaatgcttcgcgatcagcgggtggccgtgtctgtacggatgcctgaggtgcggatatagcggttaagaccttcaccggcatccggctcaaagttccatgcccgccagaccatccggccttcagtatcacgaaccaccagacggaagtgactgccctggtcgtcttcgagtgtgatattgctgtacgtggtagtgaccgcttgcgcttgtctccgggtgaaaggccccggtggcagcaacacggattgggtcattttcgggctcctgataaaagaaaaccccggcagcctgctagctgtcggggtgaatttgctggggaagatactactatcagtcgttgctgcagtctccgagagtggacagaactttctcagcgttcttccggtccgcagtgaaggtccctgctttgtggtcattgacgtagacgtcgaactgcccggcctcagagatattgctgatgaagtcaaaccaggcgttatcgccgttacgccagcccaggctggacggaataatgtactgctggtgatccatcactacggtgatagtagtgtcgtcatcgtgcgaactgaccatcttgtcatcggcaagggtaagaaagactgaatgctgatagaaaccattctggtccgggttccctgtgcagttgatggtaaacgtctttccgctggcttcggtcacgctgtattccgtattgccctgaccgtaaccctgctgccagaaccccgggatagcagaggcattaaagctcgcgagcagtacacccgccagcataaaccgacttagtgaaagtattgtcattcttgtctcctttgtcgttgttttattcctgattgtcagggttcgagggtatcagtagctgccccatcagtttgccgtcatgggcgtactcaaagtatttttctttggtatacgggtccgtcacctcctggtattccagtttgatgttatcggcaatacacagcgcattcatcagtggctggacggttttttcctgcatatccacgaggtagtagtaactgccatcctcgcagccatcgggcgactggcgggtacgtaaaacctgcaaggtgggaccggataagtagtcaacctgtgaccattcttcgctgacatcatcctggtggctgaccacatcactgaaacgcggtggggtgaggtccttaaatttactgatggccttcaggtcatcacttctgtcatcgcatgcgatgagaaacagagtggtggcaaccagcgccagcagaggcagtgttttacgtttcattatttttttcctgaaatcagacgaaccactttggcaaagacataaatgcccacgaaaatacccaccggcacgccgacgaacggtgtcagcgcgacactggcagcaccggctgcgccacctcccgtcagcagtgcggcaacagtggcaagggtcagggccgcgagactgtcggacaccccggttttgttcagaatgatgacgatgacaacaatggcgataatggcaatatccggactgatactccaggtccagatacatcagccgctcacgaaaatcacgccgcagcgtgcgcaccgacacaccaaactcagcggcaagcttacgcacactcagcgtttcccctgccaccagacggctgattatcagtgacagcctgacagccagccggtcatggcggcgttctgcctgtgtcatgagacgttctccgtgaaagttaactgactgaaaatgatgtgattactttaaagagggggtcggacagggtatggacaccacagaaactatttttcatttctgcaaaagccagaggcagcgggggttacaggccttccctcggtgagtgaggaccgtcagcacggtgcgatgcggacaggtggtgtccgatattaacaaagcagcaacattaaacggtcactgcagttgcgtgagcagggcttccgccatcacccacagtgcccggttaagtttcacgtccccgtcgataccgcgaacggcacgggtatgtgaccgtcctcctttggcattacggccactgagcccgcccttaatcaggttctcctgaatacgctggtacgtggtccacaggtcattgctctcatcctgccagcggcgaggggagaggatctgcgattcagtcaccggctggtggtcttcaccaaagcggtatgtgagggcggcttttgccagtgcctgctgtgccgggggtggcaacagcaacgactgcatggcatcccgtttctcctccacccggtcaaaaatccccagcacctcatacgcgccttcaatcacctgactcaccacgtcccccttgtgtggcacccgcacctcgccaaacgactcaccgcagacgagcccgttctgacaaaccgcacgaaatagtcccggcaacatctgatacgaactggttccatcgtgagagttgagtagaataatttccggcacctgtttaccggtgatctgcccttcccgccgcagacgcagcatatgctttgtatgttcacgacgacccgggtcacgcacgcgggtctgacaggcaaagaatggctggaagccttctcgctgtaggctgtcgagcagggagatggtgggtatataggtataacgctcactacgggactcgtgtttgtcctcactgaatacactgggcactacgcgaaacagctcttcacgggttaacggacggtcgcgacggataaggtttgctgcgccaaagcgcgaagccagacgggtcataagcagactcctcataacgggaaaacaaataaaagggatccccgtcgcatcggcgacaggggcagggaagtaacagggatgggttaaatactcagaagaagaaatcccagacggcgcgggccactgacaccaccgtggtgcgcacggcctgaatgacggcccgcaccggggcgggtatcaggggaaaggcactgatgctatcgagtacggccccgacggtttcaccaaaatcgctacgagcctgttcccggactaccgtcgtgcgaaaggaaggatggagttgcgacaccaccgggctggtggcctcacgtggcaggcacttaatcatccgctcggccatcaccttaagcccccattgtagacggaccgacacagcacacaccggatggacgggctggaacagctcatgcagcaggcagattttgcggctgatattctgcttctgcgccgtggacaactgtcccccaccgctggtaggttcggccttatccgactggctgataacaaacagcaccttatgccggtatacctctccaatcacctgatgataaaaatgttcatccaccgtcagcgcccggtcatcggccttaatcagccacagtaccaggtcgaggcgaggaagctgttcgcggtacagcgcagcatactcggtatcgcgagcgccactttcgcccacgccgggcagatccatcagcgttatatagcggtcgccgacttgcaggcgaaagcgcagtggctcacgtgtacaggccgccacatcgctgaccggtgatatatctccggcaaacagggcattgcacagactgctcttcccaacaccggttttacccataatgccgatcactggctcgtagttagttaactggttaatttgctgcagaagccgctctgatacccattgcggcagatcagcaagcgattgctgaaacgacttcaaaccttcagaattattcatcactactcctctgaaaaataataaaaaacggtagaatcgtgagattccgccgttaattgcgtatgttcagagtgatgatatatatctgaagattttttcaatcctctgcgcttgaggcagctgcgcgactgctggctcaggcaatgaatgagttataatagcagcatttactaacagggatttattgagagtatgagccgccgtgatacaccttaaaatctcaacccagcaaagtttcggagccgcgagcaaaagtgagagccttcacaaaataatgcttagtaataaagttactttgaattcagagccccgattaatgtgaacatgatcaacgaattttacccagattgagttcattcagtagccaggttttgaacacatcaagcgcagaatgcatgtgttggtgctgggggaaaaccaaataatgaccgatgtaatgtatttcgctggtactgtttacaagtgggcataccagtttaccgctagcgatttcacgttcagccagtagttttgattcaagcacaactcccaagccgtcaactgcggcagcaatcgccataaagctacggtcaaatcgaaggccataattattgggtggcgtcatcttattcgcctcaaaccatcctttccactggtacaactgcacatcgcactgaatcaatgtcaacgcatagagatcctctggtttctttagccgctcagccagttggggagaacacagtggcgtaagttcttcaacagcaagcgggatcttctcatagggtgatgggcggggttcaccgtagactatatcgagatcaaaatcatcctgttcaaaacgtgcatattctgtgctggctgaaagtcgcagatcgatgcttgggttctcacgtatgaacttaccaagacgtggtaaaagccattgatgggcaaaactcggtgcagtatgaaggcgcaaaggcctggattcatcagccgtcactaatgccaacccctgctgtaattcgttaaatccccgctgtatgtgctcaagcagtatttcaccttctttcgtcagcgtaatttctcgcgtactgcgctgaaaaaggcgtacatcaagcaagttttccagtttgcggatggcatggctgatcgcactgggtgacagttccaactcagaggcggccaacgcaaaagctccggtacgaccagccgcttcaaaggcgcgtaacagatttagaggtgcttttgctaagagcttcattcatgaatccttttcactagggatgaagtggtttactgaatttggccacctgaacagaggtgatatgctcacctcagaacaacacaggtgtcataatgaaaaaaagaaatttcagcgcagagtttaaacgcgaatccgctcaactggtcgttgaccagaactacaccgtggcagatgcagccagcgctatggatgtcggcctttccacaatgacgcgatgggtgaaacaattacgtgatgaacggcagggcaaaacaccaaaagcctcccccattaccccggaacaaattgaaatccgtgagctcaggaaaaagctacaacgtattgaaatggaaaatgaaatattaaaaaaggctactgtagattcaattggtcaacgcaacagttatgtgaaaacatggggttgcggaggttttttgaatgagacgaacatttacagcagaggaaaaagcctctgtttttgaactatggaagaacggaacaggcttcagtgaaatagcgaatatcctgggttcaaaacccggaacgatcttcactatgttaagggatactggcggcataaaaccccatgagcgtaagcgggctgtagctcacctgacactgtctgagcgcgaggagatacgagctggtttgtcagccaaaatgagcattcgtgcgatagctactgcgctgaatcgcagtccttcgacgatctcacgtgaagttcagcgtaatcggggcagacgctattacaaagctgttgatgctaataaccgagccaacagaatggcgaaaaggccaaaaccgtgcttactggatcaaaatttaccattgcgaaagcttgttctggaaaagctggagatgaaatggtctccagagcaaatatcaggatggttaaggcgaacaaaaccacgtcaaaaaacgctgcgaatatcacctgagacaatttataaaacgctgtactttcgtagccgtgaagcgctacaccacctgaatatacagcatctgcgacggtcgcatagccttcgccatggcaggcgtcatacccgcaaaggcgaaagaggtacgattaacatagtgaacggaacaccaattcacgaacgttcccgaaatatcgataacagacgctctctggggcattgggagggcgatttagtctcaggtacaaaaaactctcatatagccacacttgtagaccgaaaatcacgttatacgatcatcgttagactcaggggcaaagattctgtctcagtaaatcaggctcttaccgacaaattcctgagtttaccgtcagaactcagaaaatcactgacatgggacagaggaatggaactggccagacatctagaatttactgtcagcaccggcgttaaagtttacttctgcgatcctcagagtccttggcagcggggaacaaatgagaatacaaatgggctaattcggcagtactttcctaaaaagacatgtcttgcccaatatactcaacatgaactagatctggttgctgctcagctaaacaacagaccgagaaagacactgaagttcaaaacaccgaaagagataattgaaaggggtgttgcattgacagattgaatctacaaccgcgctcttgatgtcagactccctgaacagttctcgataatcgggaaactcagggcgcgttatcctgtggccactctctgccatgtgttcggggttcatcgcagcagctacaaatactggaaaaaccgtcctgaaaagccagacggcagacgggctgtattacgcagtcaggtacttgaactgcatggcatcagccacggctctgccggagcaagaagcatcgccacaatggcaacccagagaggataccagatggggcgctggcttgctggcagactcatgaaagagctggggctggtcagttgccagcagccgactcaccggtataagcgtggcggtcatgagcacgttgctatcccgaatcatcttgagcgacagttcgccgtaacggaaccaaatcaggtgtggtgcggtgatgtgacctatagtgtgcccggagttcagggcgggcatggatgcttaaatgaaccgcgagtctgtctggaatattgaaccggtaactcacgatgagaaacccaacaatcccaccgggtgtgacggtggagaacctgagcggcagtgacctgcggcatgcccgcagggtgatgtaacccgctgacaacggggattgaggcgagatcactaagccgagatgatcctcaaggttaagtactgaaaggttgaagaacatgaacccgttaatccgcctctgtgggttgaaaacgtcaccacggcctacgtgatctgacaggccgtgcaggaggaactggcagtgatacgtaagcactgccggtcgaaggtgttttgacatgtatgcgaaacaccggggcagcagcgtctatcacgcttgcgttgctgacttctgccaacttgcggcaagcaaggataaagagtgcgacgggcagcctcctcagtatgcctgagtccaggcaggtaaaccggggaaggtcagcgacggatgttaagggggcatggctccgatgacgcgctggctggcggagcttccgtagtagtccgcgatggggaaagcccattacatggcgaagggaagcagtttgaatgtgtttgcgacgtgaattaactgacctaacgaggtgaagacctttgataatcagcgaaatgcaacgcaagcttgccacatgggcagccaccgatccgtccctacggattcaacggctgctgcgtctgataacacaaccagaatggctggctgaagcggcgcggatcacgctttcatcaaagggggcccatacccccggcgttgatggcgtgaacaaaacaatgctacaggccagactggctgttgagctgcaaatcctcagggatgaattactctcaggccactaccagcccttgcccgccagacgggtttacatccctaaaagcaacggcaaactgcgaccactgggtatccccgcgttgcgggatcgtattgttcagcgggccatgctgatggcgatggagccgatatgggagagtgattttcatacgctctcatatggcttccggcctgagcgcagtgtccaccacgcgatccgcacggtgaaattacagctcacagactgtggtgaaacccggggacgctgggtgattgaaggcgacctgtccagttacttcgacaccgtacatcatcgactgctgatgaaggctgtacgccgcaggatcagtgacgcacgtttcatgactctgctgtggaaaaccatcaaggcgggacatatcgatgtcggtctctttcgggcggccagtgaaggtgtgccacagggcggtgttatatcgccgctattatcgaacatcatgctgaatgagttcgatcaatacctgcatgagcgctacctgagcgggaaagccagaaaagatcggtggtactggaataacagtatccaacggggccgaagtacggcggtcagagaaaactggcagtggaaacccgcggtggcgtactgccgctatgccgatgattttgtcctcatcgtcaaaggcaccaaagcacaggtggaagccatcagggaggagtgtcggggtgtgctcgaaggcagtctgaaactcaggctgaacatggataagactaaaatcccccatgttaatgacggctttatctttctggggcacaggctcattcgcaaacgcagtcgttatggcgagatgcgagtggtctcaacgatcccgcaggagaaagccagaaacttcgccgcatcgctgacagcactgttatggaaggtgcgaataagcggggaaattcttctcggctgactcagtcatttcatttcttcatgtttgagccgattttttctcccgtaaatgccttgaatcagcctatttagaccgtttcttcgccatttaaggcgttatccccagtttttagtgagatctctcccactgacgtatcatttggtccgcccgaaacaggttggccagcgtgaataacatcgccagttggttatcgtttttcagcaaccccttgtatctggctttcacgaagccgaactgtcgcttgatgatgcgaaatgggtgctccaccctggcccggatgctggctttcatgtattcgatgttgatggccgttttgttcttgcgtggatgctgtttcaaggttcttaccttgccggggcgctcggcgatcagccagtccacatccacctcggccagctcctcgcgctgtggcgccccttggtagccggcatcggctgagacaaattgctcctctccatgcagcagattacccagctgattgaggtcatgctcgttggccgcggtggtgaccaggctgtgggtcaggccactcttggcatcgacaccaatgtgggccttcatgccaaagtgccactgattgcctttcttggtctgatgcatctccggatcgcgttgctgctctttgttcttggtcgagctgggtgcctcaatgatggtggcatcgaccaaggtgccttgagtcatcatgacgcctgcttcggccagccagcgattgatggtcttgaacaattggcgggccagttgatgctgctccagcaggtggcggaaattcatgatggtggtgcggtccggcaaggcgctatccagggataaccgggcaaacagacgcatggaggcgatttcgtacagagcatcttccatcgcgccatcgctcaggttgtaccaatgctgcatgcagtgaatgcgtagcatggtttccagcggataaggtcgccggccattaccagccttggggtaaaacggctcgatgacttccaccatgttttgccatggcagaatctgctccatgcgggacaagaaaatctcttttctggtctgacggcgcttactgctgaattcactgtcggcgaaggtaagttgatgactcatgatgaaccctgttctatggctccagatgacaaacatgatctcatatcagggacttgttcgcaccttccggaggcgttatgagctggcggccctttttgtatctgattattaatccccacccgctattaagcgcccggcgcgggcatctgcgtctggtgcagggttgactttgcattctgttaacaaacgcggtataacaaaccttctttggatgtttagatgtccatacgtttagaaggttatatgcaaacaacacaacaaaatgcgccactgaagcgcacaatgaaaacgcgtcacctgattatgctttccttgggcggcgtgattggcacaggattattcttcaataccgggtacatcatttccaccactggagcggcgggaacgctgctggcctatctgattggtgcgctggtggtctggctggttatgcagtgtctgggcgagctgtcggtcgcgatgccggagaccggagcgtttcacgtttatgccgcgcgctatcttggtccggctaccgggtataccgtggcctggctttactggctgacctggaccgtggcgctgggttcgagctttaccgccgctggattctgtatgcagtactggtttccacaggtgccggtatgggtctggtgcgtggtgttctgcgcgattatttttggtctgaatgttatctccacgcgcttttttgccgaaggggagttctggttctcgctggtcaaagtggtcactatcatcgcctttatcatcctcggtggggcggcgattttcggctttattccgatgcaggatggctcgcccgcgccggggctgagtaatatcacggcagaaggctggttcccgcacggtggcttaccgattttgatgactatggtggcagtgaactttgctttttcgggtaccgagcttatcggcattgccgccggtgaaacggaaaacccgcgcaaagttatcccggtagcgattcgtactaccatcgcgcgactgattattttctttatcggcaccgtgtttgtgctggcagcgctgatcccgatgcagcaggtgggcgtggagaaaagcccgtttgtgctggtatttgagaaagtagggatcccgtacgccgctgatatttttaacttcgtgatcctgacggctattctttctgcagcgaactccgggttatatgcctccgggcgcatgctgtggtcgttgtcgaatgaacgtacgctaccggcctgttttgcgcgagtaacgaaaaacggcgtgccactgacggcgctgtcggtcagtatgctcggtggtgtgctggcgctgttttccagcgtggtggccccggacacggtatttgttgcgctgtcggcaatctccgggtttgcggtggtagcggtgtggctgagtatctgcgcctcgcattttgtttttcgtcgccgtcatctgcaacaaggtaaggcattgagtgaattacattatcgcgcgccgtggtatccgctggtgccagtattaggttttgtgctgtgcctggtggcctgtgttgggctggcattcgatccagcgcagagaattgcgttgtggtgcgggttaccgtttgttgcgttgtgctatggtgcttatttccttactcaaccccgaaacgcaaaacaggagccagaacatgtcgcagaataatccgttacgcgctcttcttgataaacaggatatcctgctgctggatggcgcgatggcgacggagctggaagcgcgagggtgtaacttagccgacagcctgtggtcagccaaagtgctggtagaaaacccggagcttatccgcgaagtgcatcttgattactaccgggcgggggcgcaatgcgcgatcactgccagctatcaggcgacgccggcgggcttcgccgcgcgaggtctggatgaagcgcagtcgaaagcgctgattggcaaaagcgtggagctggcgcgtaaagcccgtgaagcgtatctggcagagaacccgcaggcgggaacgcttctggtggcgggatccgtcgggccttacggcgcgtatctggcggatggctctgaataccgtggcgattatcattgtagcgttgaggcatttcaggcgtttcatcgcccgcgcgtggaagccttgctggatgccggggccgatctgctggcctgcgaaaccctgccgaatttttccgagattgaggcgttggccgagctgttgaccgcatatccgcgtgcgcgggcgtggttctcatttaccctgcgcgacagcgaacacctgagcgacggtacgccgctgcgtgacgtggttgcgttgctggcgggttatccgcaggtggtggcgctaggcattaactgtattgcgctggaaaacaccaccgctgcgttgcagcatttacacggtttaacggtgctgccgctggtggtgtatccgaactcgggcgagcattacgatgccgtgagcaaaacctggcatcatcacggtgaacattgcgcgcagctggcggattatctgccgcagtggcaggccgctggcgcacggttgattggcgggtgctgtcgcaccacgcctgcggatatcgccgcgttaaaagcgcgaagctgagggtttatcgggtctacatcgttcattgtaggcctgataagcgcagcgcatcaggcattgccggatggcggcacaagcgccttatccggcctacaaaaccacaaaacgttatgccgcatccgccagaacaaacatgccgtacggatggatttcaagataatactgctcgccgacgtccggttgcagacgcgtagcgttgacctgcaataatatctcctgcccgtgccattccaccgtcacttcatactgcggccccatataggcgacatggcggatcacgcagcgctggctctcttcgccgcgatcgctgagcgtgatcgcttccgggcgcacaccgaccatcccttcaccctgtgtaccaaagtgcagcgggcgcggcagatgatagccgtagatatcaacgtatccgtcgctgaaggttgccgggaacaggttggcatcgcccataaagctcgccataaagcgggaggcgggctggcggtaaagatcctgcggtgagccgatctgcatgatgtgtcccttgttcatcaccagcacagtatcagaaaccgcaaaggcttcgctctgatcgtgggtgacgtacagcgaggtgatatcaaactgcttttgcaactcgcggatcttgtcgcgcatgctgcgacgcaggttggcgtcgaggttactcaacggctcatcaaacagcagcactttcggcttgaggatcagcgcgcgggccagcgccacgcgctgctgctgcccgccggagatctgatcgacaaagcggtcttcgaatccttccagatccaccatcgccaacgcctctttgacgcgggctttcagctctgcgcgcggtacgccgagcattttcaggccataaccgacattctctcccagcgacatatgcgggaacagggcataggactgaaacaccatacagatatcgcgctgctgaatagagcgatgggtgacgtcttcgccatcaatgaaaatttgcccttcgctcggtttttccagcccggcaaccaggcgcaaaatagtggttttgccgcagccggacgggccgagcagcgtcaccatttgcccctgcgggatggtgaggttgatattgtcgattaccgtattactgccaaatcgtttagtgacgttgcgcagttcaacgaaatttttctgagtcatagtgcgctccattacgcctggtttttggcttttgaacgggaggtacgtgattcaccgatcagccagtcaaagatgaaaataatcgccagcatcaccacgatcagaatggaaccgtaggcaatcgctacaccgtattcgccatcttccacgcggttgaggatgtaagccgtcgctacgcgggtatccggcgtgacgaggaacacaatggcgctgacggtggtaatggcgcgcacaaagctgtaaatcagcgccgagaggatcgccgggcgcagcagcggcagcaggatgtgcgtaatggtacgcagggaaccggcgcgcaggctgagtgaggcttcatcgagcgatttatcgatttggcccggtaatgactccaacttattgatagtgttttatgttcagataatgcccgatgactttgtcatgctgctccaccgattttgagaacgacagcgacttccgtcccagccgtgccaggtgctgcctcagattcaggttatgccgctcaattcgctgcgtatatcgcttgctgattacgtgcagctttcccttcaggcgggattcatacagcggccagccatccgtcatccatatcaccacgtcaaagggtgacagcaggctcataagacgccccagcgtcgccatagtgcgttcaccgaatacgtgcgcaacaaccgtcttccggagcctgtcatacgcgtaaaacagccagcgctggcgcgatttagccccgacgtatccccactgttcgtccatttccgcgcagacgatgacgtcactgcccggctgtatgcgcgaggttaccgactgcggcctgagttttttaaatggcggaaaatcgtgttgaggccaacgcccataatgcgggcggttgcccggcatccaacgccattcatggccatatcaatgattttctggtgcgtaccgggttgagaagcggtgtaagtgaactgcagttgccatgttttacggcagtgagagcagagatagcgctgatgtccggcagtgcttttgccgttacgcaccaccccgtcagtagctgaacaggagggacagctgatagaaacagaagccactggagcacctcaaaaacaccatcatacactaaatcagtaagttggcagcatcaccgagaacacaaatgggctaattcggcagtactttcctaaaaagacatgtcttgcccaatatactcaacatgaactagatctggttgctgctcagctaaacaacagaccgagaaagacactgaagttcaaaacaccgaaagagataattgaaaggggtgttgcattgacagattgaatctacagcagctttttttaatatgtcccgttcgtcggtaacccgtttcagctctttctggagacggcggatctcggcctgagcatctgactgttctttattagtggaagaatccggaccgtacttctttatccaggcataaaggctgtgggtggtgatatcgagacgtgttgcaacgctggcaacagaataaccgagatcaacaacctgtttgactgcttcagttttaaactcttcgggataacgcttaccgctcatgggcacctctctttaagccattttaaatgactcggaggtgtctgttaaacccgtggcgattcaaaattgcgatatatacatacccatgactgcccagcgtatcggcttcaccagtcagcccgttacggtacagtgtgacacagtgcgcgtacctgggattcagctcacaggagagcagcatcagctccagatgtgcgacaaaatgcgggaaggcttcatccagttgtagagtctgcacctcactgaatgagccggtgaatccagcccggtcagccagaaaatgcagacgatgaccttcctgcaccagtcgtgctccgaaacacggtgtgatatctcgtttaagcccccaagtttgagtagagtctttattcataattttattcctgttaaagaagaccatgttcggcgaatgagaatatttgcctgccgccgacaatcaggtggtcggggacatggtgaacactttttaacatcctttacccatggtgatcgactttttcttcaggtcgatcacccccactttcgtgctgtaccaccacacctcgtagctgccgtcttcctgcatctccttcagcccgacccgttctcccctgaacgccttgcctgcgctcagacttacccctttcacgctcagctttccgctgatatccactttcctgaccatcaccccttcatcgtattccgggggcgttgtgttgccgctgtactgccgcgctgacggctgataccgcgagcccggtaccgccatatccagcgcctcgtgcgggcgttcaaggttatagaccgtccgccagtggtcgaaggcgcgctgcagttcaccgctgtctgcgaaccattttccctgcagcacttccgccttcaggctgcggtgaaaacgctccagcttcccctgcgtctgcggatgataaggccgggagtgccccacccggatacccaggcgcatcagccacagctccagcgccgtccaggtgccggtggtgtcgccccacggtgagccgttatccatggtcatccggtccggcaggccgtaacgctcaaacacgctgaccagctgctgctgcacggtctcgcgccgttcatcggtacagtgcgccaggcacagggaaaaacgggagtggtcgtccagcagggtgagcggatggcagcgtccaccgccaaaaggaaagtggcccttaaaatccatctgccagaggcggttcggcgcgtcgtgttcgaaccggcccgtggcgggaatgcccggtgaagcgcccggcagcaggccatggcgggccatcaggttatggacggtgctgaaggcgggcatggtgtgcccctggtcctcgagccagcgcttaatcttgcgggctccccagcgttcatgacggtcatgggccatacgcagcagggccgtgatgtcgtcagatgagcggttcggggaatggtgcggaatgcgcgggcggtcctgaagaccggcggcaccttcctgagcccagcgctggagccacttgtagccggtggcaggtgaaatgccgaagcgacggcagagggaacggatgttcgccccgtcctgcgaggcgaacaaaacaaactcagtacgtaatgacatggtatctctcgcatcccagggcataagcgactccataaacgggttcttatgccttagttgtaagtgtctaccatgtccccgaacaagtgttcactatgtccccggaccgtacaccccaaaggggagaggggactgcaccgagccatcttttccccctcgcccctttggggagagggccggggtgaggggcaatatgtgatccagcttaaatttcccgcactccctcttcccttccgatttacctctccttgttctgcgtcatagtatgatcgttaaataaacgaacgctgttctataatgtagaacaaaatgattcagcaaggagatctcatgccgcagtccgcgttgttcacgggaatcattccccctgtctccaccatttttaccgccgacggccagctcgataagccgggcaccgccgcgctgatcgacgatctgatcaaagcaggcgttgacggcctgttcttcctgggcagcggtggcgagttctcccagctcggcgccgaagagcgtaaagccattgcccgctttgctatcgatcatgtcgatcgtcgcgtgccggtgctgatcggcaccggcggcaccaacgcccgggaaaccatcgaactcagccagcacgcgcagcaggcgggcgcggacggcatcgtggtgatcaacccctactactggaaagtgtcggaagcgaacctgatccgctatttcgagcaggtggccgacagcgtcacgctgccggtgatgctctataacttcccggcgctgaccgggcaggatctgactccggcgctggtgaaaaccctcgccgactcgcgcagcaatattatcggcatcaaagacaccatcgactccgtcgcccacctgcgcagcatgatccataccgtcaaaggtgcccatccgcacttcaccgtgctctgcggctacgacgatcatctgttcaataccctgctgctcggcggcgacggggcgatatcggcgagcggcaactttgccccgcaggtgtcggtgaatcttctgaaagcctggcgcgacggggacgtggcgaaagcggccgggtatcatcagaccttgctgcaaattccgcagatgtatcagctggatacgccgtttgtgaacgtgattaaagaggcgatcgtgctctgcggtcgtcctgtctccacgcacgtgctgccgcccgcctcgccgctggacgagccgcgcaaggcgcagctgaaaaccctgctgcaacagctcaagctttgctgagccggacgataacgatgaccattgagaaaattttcaccccgcaggacgacgcgttttatgcggtgatcacccacgcggcggggccgcagggcgctctgccgctgaccccgcagatgctgatggaatctcccagcggcaacctgttcggcatgacgcagaacgccgggatgggctgggacgccaacaagctcaccggcaaagaggtgctgattatcggcactcagggcggcatccgcgccggagacggacgcccaatcgcgctgggctaccacaccgggcattgggagatcggcatgcagatgcaggcggcggcgaaggagatcacccgcaatggcgggatcccgttcgcggccttcgtcagcgatccgtgcgacgggcgctcgcagggcacgcacggtatgttcgattccctgccgtaccgcaacgacgcggcgatcgtgtttcgccgcctgatccgctccctgccgacgcggcgggcggtgatcggcgtagcgacctgcgataaagggctgcccgccaccatgattgcgctggccgcgatgcacgacctgccgactattctggtgccgggcggggcgacgctgccgccgaccgtcggggaagacgcgggcaaggtgcagaccatcggcgcgcgtttcgccaaccacgaactctccctgcaggaggccgccgaactgggctgtcgcgcctgcgcctcgccgggcggcgggtgtcagttcctcggcacggcgggcacctcgcaggtggtcgcggaggcgctgggtctggcgctgccgcactccgcgctggcgccgtccgggcaggcggtgtggctggagatcgcccgccagtcggcgcgcgcggtcagcgagctggatagccgcggcatcaccacgcgggatatcctctccgataaagccatcgaaaacgcgatggtgatccacgcggcgttcggcggctccaccaatttactgctgcacattccggccatcgcccacgcggcgggctgcacgatcccggacgttgagcactggacgcgcatcaaccgtaaagtgccgcgtctggtgagcgtgctgcccaacggcccggactatcacccgaccgtgcgcgccttcctcgcgggcggcgtgccggaggtgatgctccacctgcgcgacctcggcctgctgcatctggacgccatgaccgtgaccggccagacggtgggcgagaaccttgaatggtggcaggcgtccgagcgccgggcgcgcttccgccagtgcctgcgcgagcaggacggcgtagagccggatgacgtgatcctgccgccggagaaggcaaaagcgaaagggctgacctcgacggtctgcttcccgacgggcaacatcgctccggaaggttcggtgatcaaggccacggcgatcgacccgtcggtggtgggcgaagatggcgtataccaccacaccggccgggtgcgggtgtttgtctcggaagcgcaggcgatcaaggcgatcaagcgggaagagattgtgcagggcgatatcatggtggtgatcggcggcgggccgtccggcaccggcatggaagagacctaccagctcacctccgcgctaaagcatatctcgtggggcaagacggtgtcgctcatcaccgatgcgcgcttctcgggcgtgtcgacgggcgcctgcttcggccacgtgtcgccggaggcgctggcgggcgggccgattggcaagctgcgcgataacgacatcatcgagattgccgtggatcgtctgacgttaactggcagcgtgaacttcatcggcaccgcggacaacccgctgacgccggaagagggcgcgcgcgagctggcgcggcggcagacgcacccggacctgcacgcccacgactttttgccggacgacacccggctgtgggcggcactgcagtcggtgagcggcggcacctggaaaggctgtatttatgacaccgataaaattatcgaggtaattaacgccggtaaaaaagcgctcggaatttaattattttaagagataaaaccgtctgcggaatatttcccgcagacggctttgttgtttttgaaatttattaatttaaacaattagttgagatatatcgttggcgtcacaaaagcaaaataacgtaattcggaaataagatatgaccattgctggttaattgaatagctcattacactccattaacacgatgttgtaattcggcacactacataagggtgtaattctgatgacgcaattaaccatgaaagacaaaattggctacgggctgggagacaccgcctgcggcttcgtctggcaggccacgatgttcctgctggcctatttctacaccgacgtcttcggcctgtcggcggggattatgggcacgctgtttttggtctcccgcgtgctcgacgccgtcaccgacccgctgatggggctgctggtagaccgcacccgcacgcggcacggccagttccgcccgttcctgctgtggggggccatcccgttcggcatcgtctgcgtgctgaccttctacacgccggacttctccgcacagggcaagatcatctacgcctgcgtgacctacattctcctgaccctggtctacaccttcgttaacgtgccgtactgcgccatgccgggcgtcatcaccgccgacccgaaagagcgtcacgccctgcagtcctggcgcttcttcctggcggcggcgggctcgctcgctatcagcggcatcgcgctgccgctggtgagcatcatcggcaaaggggacgagcaggtgggctacttcggcgccatgtgcgtgctggggctgagcggcgtggtgctgctctacgtctgcttcttcacgaccaaagagcgctacacctttgaggtgcagccgggctcgtcggtggcgaaagaccttaagctgctgctgggcaacagccagtggcgcatcatgtgcgcgttcaagatgatggcgacctgctccaacgtggtgcgcggcggggcgacgctctacttcgtgaaatacgtgatggatcacccggagttggcgacccagtttttactttacggcagcctcgccaccatgttcggctcgctttgctcctcacgcctgctgggccgcttcgaccgcgtcaccgccttcaagtggatcatcgtcgcctactcgctgatcagcctgctgattttcgtcaccccggcggagcacatcgcgctcatttttgccctcaacatcctgttcctgttcgtctttaataccaccacgccgctgcagtggctgatggcttctgacgtggtggactacgaggagagccgcagcggtcgccgcctcgacgggctggtgttctccacctacctgttcagcctgaagattggcctggcgattggcggggcggtggtgggctggatcctggcgtacgtcaactattccgccagcagcagcgtgcagccggttgaggtgctcaccaccatcaaaattctgttctgcgtggtgccggtggtgctctacgcgggcatgttcatcatgctgtcgctctacaagctcaccgatgcccgcgtggaggccatcagccggcagctgattaagcaccgcgcggcgcagggcgaggccgttcccgacgccgcgacagccgcatcccattaaccggaggcaatatggaaatcactaacccgatactcaccggcttcaacccggacccgtccctgtgccgccagggcgaggactactacatcgccacctcgaccttcgagtggttcccgggcgtgcgcatctaccactcccgtgacctgaaaaactggtcgctggtcagcaccccgttggaccgcgtgtcgatgctggacatgaagggcaacccggactccggcggcatctgggcgccgtgcctgagctacgccgacggtaaattctggctgctctacaccgacgtgaagattgtcgactcgccgtggaaaaacggccgcaacttcctcgtcaccgcgccctccatcgaggggccatggagcgagccaatcccgatgggcaacggcgggtttgacccgtccctgttccacgacgacgatggccgcaaatactatatctaccgcccgtgggggccgcgccaccacagcaacccgcacaacaccatcgtgttacaggcgtttgacccgcagaccggcacgctctcgcccgagcgcaaaacgctgtttaccggcacgccgctctgctacaccgaaggcgcgcacctgtatcgccacgcgggatggtactacctgatggccgccgagggcggcaccagctacgagcacgccgtcgtggtgctgcgttccaaaaatatcgacgggccgtacgagctgcacccggacgtaacgatgatgaccagctggcacctgccggagaacccgctgcagaagagcggccacggctcgctgctgcagacgcatacgggtgaatggtacatggcctacctcaccagccgcccgctgcgcctgcccggcgtgccgctgctggcctccggcggacgcggctactgcccgctggggcgcgagaccggcatcgcccgcattgaatggcgcgacggctggccgtacgtggaaggcggcaagcacgcgcagctgaccgtgaaaggcccgcaagtagccgagcagcctgcagccgttccgggcaactggcgggacgatttcgacgccagttcgcttgacccggagctgcagaccctgcgcattccgttcgacgacaccctcggctcgctcaccgcgcgcccgggcttcttacggctctatggcaacgactcgctcaattcgaccttcacccaatcgaccgtggcgcgccgctggcagcacttcgccttccgggcagaaacgcggatggagttctcgccggtgcacttccagcagagcgcggggctgacctgctactacaacagcaaaaactggagctactgctttgtggactacgaggagggacagggtagaaccatcaaagttatccagctcgaccacaacgtgccgtcgtggccgctgcacgagcagcccattccggtgccggaacatgcggagagcgtctggctgcgggtggacgtggatacgctggtctaccgctacagctactcgtttgatggcgagacgtggcacaccgtgccggtgacgtatgaggcgtggaagctgtcggacgactacatcggcgggcgcggcttcttcaccggcgcgtttgtgggcctgcactgcgaggacatcagcggcgacggctgctacgcggacttcgactacttcacctacgagccggtctaacggctcaggccgggtagcccagcgcgcgcgagagcgcgagcccggcctgctgaagctgctcgcggaaattagccagctccgcgtcgtccacgcgggaggtcagcgtcgacaggctcagggcggcgatgacgcgggactcgtggttccacaccggcaccgccacgcagcgcacgccctgctcgttctcttcgctgtccagggcgtagccttgctcgcgggtctgcgccagggcgctcattaaggcttcgcgagacgcgagggtggcgggcgtaaaggtagtgtactgatagccctccagcagggcgttcagctcggcctcgcccagccaggcaatcaacaccttgccgatggcggtggcgtgcaccggcaggcggcggccgatgcgtgaataggcgatggcggccagcttgccttcaatcttctcgatatagaccccttcacgcccgtccaggatccccagatgggtggtctgcccggtccgccgggacagctccgtcagccagccttttgccttctgccgaatatcgatggagcccacgacaaaatggccgcgctcgaccagcttcatgccgaggcgatacttgccgttctccgggttctgatcgatatagccgtgaagctgcagggtttttagcagcgagtggagggtactcttgctcagccccatcagtttgctgatgtcggtgatcttaagctcggtggcctgctcgttgaacaggtcgaggatctgcaacgcacgttcaacagactgaataatcggcataatgctggcatgtccacgctggaattaaggcgaaaacgtacctttttcgggatgaaaaatcaatgaaatggagccggtgttctccctctccctgtgggagagggccggggtgagggcaccaacgcgcagcggacccaatcactccccaagcgttgccatcatcaccgccttaatcgtatgcatccggttttccgcctggtcgaacacgatgctcgccgccgactcaaacacctcgtccgtcacctccatcccgccgtgcagatcgaactccttcgccatctgcttgccgagcgtagtctggtcgtcatggaacgccggcagacagtgcaggaacttcacgttcgggttgtcggtcagcgccatcatctgcgcgttcacctgatacccgcgcagcagcgcaatccgctctgcccacttctctttggcctcgcccatcgacacccacacgtcggtatagataaagtccgcgcccttaacgcctgccgccacgtcttccgtcagagtaattttcccgccgtgcttctccgccagcgcgctgcactccgccaccaggctctcttccggccagcaggctttcggggccaacaggcgcagatccagcccggtcagcgccgccgcttccagcatcgagttgcccatgttgttgcgcgcatcgcccgcgtagaccagcgtcatctcgttaaacgccttgcccggcaggtgctcctgcatggtcatcaggtccgccagcagctgggtcgggtggaactcgttggtcagcccgttccacaccggcacgcccgcatactgcgccagcgtttcgaccacttcctggccgtgaccgcgatactgaatgccgtcatacatccgcccgagaacccgcgcggtgtccttaattgactctttatgcccaatctggctgccgctcggccctaaataggtaacgcgcgcgccctggtcaaatgcggcaacttcgaaagagcaacgggtacgagtcgagtctttttcgaagatgagcgcgatgtttttaccggtaagcttctgtacttccttgccattttttttatcggctttgagctgtgcggcaagggtcagcagagaagtgaactgtgcaggggtaaagtcgagcagtttcagaaagtgttttttgtataaatcggacattttatcctcgcatggcgaacgccacttattgaattaaaattcactttatatgtgtaattattcatttgcaaccccatttcacaattctttcttacaaaggtggaggcaaacccgtccgtgtgtgaaaataatcgtatctgcctccgattctctgcagaagcagaaagacattggatcgaattctacaaccaggtcgagtcagaaatgagaatgattggccttctttatgattttaaggattatgcttctaaaatggcggagaacatggcgaggcttgctgccttacttcattacttcagcggtgatggaggcgatatatctgttaccgggtaatgactccaacttattgatagtgttttatgttcagataatgcccgatgactttgtcatgctgctccaccgattttgagaacgacagcgacttccgtcccagccgtgccaggtgctgcctcagattcaggttatgccgctcaattcgctgcgtatatcgcttgctgattacgtgcagctttcccttcaggcgggattcatacagcggccagccatccgtcatccatatcaccacgtcaaagggtgacagcaggctcataagacgccccagcgtcgccatagtgcgttcaccgaatacgtgcgcaacaaccgtcttccggagcctgtcatacgcgtaaaacagccagcgctggcgcgatttagccccgacgtatccccactgttcgtccatttccgcgcagacgatgacgtcactgcccggctgtatgcgcgaggttaccgactgcggcctgagttttttaaatggcggaaaatcgtgttgaggccaacgcccataatgcgggcggttgcccggcatccaacgccattcatggccatatcaatgattttctggtgcgtaccgggttgagaagcggtgtaagtgaactgcagttgccatgttttacggcagtgagagcagagatagcgctgatgtccggcagtgcttttgccgttacgcaccaccccgtcagtagctgaacaggagggacagctgatagaaacagaagccactggagcacctcaaaaacaccatcatacactaaatcagtaagttggcagcatcaccgaattttcagcccggatgtttcacgtacctatgtcgaatatctggccgataaggttgcggatcgagaagaggatgcagaggaatatctggaagcaatcatggaggctcgtgttaccgttgctggcatggggctggtgatggaggtgcaggattacttcgatggcgaggccgatagactggcgaaggcgtggctggccgagtacacaccgcaaatcaagtcgttgaaagatgagcgtaaagaggcctatcgtcaaatcgtcgaaatgagtaccgaaccgcaggatgtggatctggtcaggccggcgaacaagtttgaaatgaccagggtgcgtgaaggtgaaaaggaagctgaccttccagtctggaaacaccatttgttgtgtgacgaaagcgggaactatccggctctgttgaaccattgggaaaccaaggtttttgagatcgaaaccaaacgtgaaggatttgctttctggtatcgtaatccacagtacacagggcagtcgtcactgggaatcgcttatgttgaagctgaacagtacaagattgttcgtcccgatttcctgttctttgccgaacaggatggcaaaatggttgtggacctggtagatccacatagcctacatctggctgatgctttgcccaaactggaaggacttgcgctatatgccgaacatcattctgatgcttacaggcgaatcgaatctgtcgccgaagtaaagggtaaattacgagtgttagatttgaaacggcaggatgtgcaggatgctgttgctaccgctgaaaatgcagaaacgttatttagtagcggacttgctgatgactatcagtaatctatagaaaattgcgtaacgaaactgcattttagtaattttttgaaacaatacaaataaggccttctcactgagaaggccattaccgacttacagttcgatttggctacagccgaagttacggtctccttcaccaaacactttgctttcaactttggtcaggtagtccagtcgggttaacagcgcctggtagttctgctggaagtcagtactattggtgtctagcacatacttacagttttcaggaaaatggaccagaccagggtgatcgtctctctccagtctcagggcgctgtaccaggctcctgtgatcatccctctaaggttatcgtcctgatcgtaatccccgaggtggtagtaagcgtctttgttgaacaacaggcaaatgtgatagtggcatttacctgattcagaatactctttcgcccatataataaataaagggcaacggtaaatgcgtttatcctcacgcaccttacgggtacggtcagcctccagcttagctctgagggattcacgcatccgggatatcaccccaggttccaggttagggaagcaacagatattgtcaccgttatcaactattttgggatagtggagatcgacacgtacagcaattaacctaggataccggttagtcaaataacataataatttattaatcttactctgatattcgaggatatgtactccatgagtaccttgatatgttttcataatatatacctgtatttggtcctacggtctatagcagaccgtacagggatgccatacaggcagggctattcctggtcactgttgtcggtatatactggtatcagattttagtacggacatactgatctgattactactcttactggtgaatacaggtagtaagagtacacaatgccattatataatacctatccaacatctaaatttgagacgaaggtagccccagcctgtgatggctgttaaaaagttactctgcaattagcttctggaattaaccgatgattccgttattccagtgccgcttcacagtcgataaactgatactcaatttctttgcaatctcagcctgagtaaatccacctttcttaagtattgtgatatcacgtcggtatttgcttccctcctttcgtcctaattttttcttaacatgtcgatatcggcttttagttgatttcagattgtgaatgtcaatcgtatcctgacgagcaatcaaaaaagacaagcaactttcagcagaaggctctatccttgaagctggatggtagctgtagataaacatttctttttgaaggcaaaaaaataaaatattctgtaagtcctccacagttctgccaagacagcttagatctggaatgacaagcgtgtcctgccggttcatttcatgatgaatcaattgtctgagtaaacgttgctctgaaacaacctctttaatatctacctgctcgatcacaacatgttcaggtagaatattaaatttttggcatatctcagcaagtgagtgatgatctgtaatgctttcttgctgttcgctactgcatatggtgtaaaaaaatgaacgcatctgatgcactccggtgtcataaattattttttgatacctgaataatgtcattttgcataaaaaacaaccaaaaatagagagtgattgccagcgatactttaactggtaaagtagtattttacctctcataattgtttgtccttctttgttacctcttaggttctgctctcttgtgagtatgggtttataatgatgtcatccggtacattaacacggttggaaacatctgttttgcggagcactggcagcataaccaccatttcattgacatggtaaatatcaatccaacaaacaaccggataaggcataacaatcccctttcttctaagaacttcatttatcccgaatataatcaattgggatgttgacaagagtagagcctgcccggcatcaaagtaataaccctcaaaggttgttctatgaataagaataatgtttgaatatcctgagacactttgatgctttacatcaaaatgtctttgattgtaaatgtaaatggctttttccatatcgtaattttcccttagcgaggatagcctttcacgtataactgttttttcatctttccccatgaattcatcattagcgttcagttgaaagtaatctgcaatggggatttttaatggactcatgatgttcgttttccagattaacgaacagtactcttccagagttacttctgttttacctcggcttcgattgatgctttcttttatagagaactttaacaggtcattttttatttcatttattgaccagttatgacgattgcatttttctaatatagggatagccaaatccacaacttccgctattacggaagagtgagatttatttgttagtctggcataatgatcaattactcctaatgaagattgatttttgaacgtgactgagtgtttttttatgggagtagtctgtactacctgtgactcattgtttttgccttgacaaggtttttttcctggtagaacgctgctcatctcaaaattagtaacactattagacatttttaaggaaacctctttgttatctcaatataaaactactatctgaaatttctcagtgttgccccatttttctcggggcaacatcgctataaatcaataaaattaaatctgtaatttattacagactttctcgtacagaaaatgtatctataaaatcgaggacatctttacgtaaccagtaatggcggccattgatttgttttgggcgaggtagcccctcaggcaatttgtcctgacaaagccatttacgaatggtttgagatttgtagctaatgattttagctaactcagctgttgaaatgagctgtgattgagatgtatccgggagtttgaatgcgctcattttgccacctcagtgattgagatattggcaaagaaagctttaagcattattgaattagtaggggtagtaatgaaggcagaaggaaacgtttcgggctcggggtcggggtcactaccatcacctgaatctgatgataaggcacttttagctgatttagccgtactgtgatgcgatctggatgcctgatttttacatgacatcagacgcgcgagaaagttagtagcattttgcattctttgtttaagatgtaaaattttcagtttggcgcatgcgacagacttgcgaagagctgagtatgttcctttgagatactcgacaacctcttccatggacgcaggatcgttaaaggattgagttgttttacttgaattaatacaccagcgagctctgatagctgccagagtgggttctatggatacagttgctggggttgccattggcttatctcctgtgtagttgctgtatcattgactaaactgtgtattacgatacatgaaaatctatcttgatcaatagttgatgatattttgtaatatgttgatttttaatggaatcaacgcatatcaacgttgttttttatggtaatacctgcttcatttaagatccatgtctcaattttctcgtgccattttcgtaacagatctaacggacgacggcgatagtgtttttcggcaagagcgctgggtttgtgtcccataatttgagcaacaataccagtgggaacttcaacccactcggccaaagtaccaaaactacgacgtaaaccgtgaaggctgatatgtggtaactcagccagcactaatgctctgttgtgcgctgaacgcggctcaataattttgccacttttactgttacttctgaaaacccaaccctccttatttacgtcagaatttggggattgcgctagtacatttaacaattcagaaacataaggagtgagagggatgatacgttcaccttcgatcttgtctttaattcgcatgcttgaccatttgaaatctacgtctgaccagcgaagcgacgcaatttcttcacgccgagcaccagtgagcaaaagtacttggagataggccgatgcaataggattattgaggctacgcacggcactaaaccagctttttagttgttccttttgcaggcaatcatcagctttactcgctgacacgggaaccatttttcttacgttgtaatcttgtgccagatcgccaggaatgatcccttgatattttttctgataattactccatttgatgaaagcacgtagtaggcgataagcgtgagcagtgacggtaggtctattttgcctttctgtactcagccacgctgctatgtaatctggggttagctccgataacggcaggttgagcaaactagccaatggtccagccgaagtcgggccttggcctctttttttactttcgcctccacgactggacaagttaatgtgatcggcaatgtatcgagtagaatatgggcgtttagtttttgcactgataccggttctcaattcttgaagatagtcttcccaggcgacggagaaagtcacttttgttttacgtgattctgcctgcagggattctgcttctgcgatttttacagccttagcaattcgtggatctatccctgtatcgatcaatgtttgtaaccgtcttgcctcggctctcgcatcatcaatcttccagtcgttaatgttgccaatagtcatgcgaagggttttccccgcatatacgctttggaatacaaaggcttttgctccgctagttgctcggcatgccagggttgttacatctgcatcccaaagaaaagtttgttttttcccttccggtaaggtgaatctgcgaagtctttcgaaggtaaatttttgtcttgaaagcgccatttttcggctccagttgagaattgctgtcttacaataatgtaactgctggtgtaagtaaatggagggaataaacatcaacttttgttaatttcaatcaacgggtttattgctataacttggtgttttataatataaagtatgttgttttgattgattgctcaagtagttaaaaatgcattaacatcgcattcgtaatgcgaaggtcgtaggttcgactcctattatcggcaccattaaaatcaaagagttaccccatatttaaatacaccacgtttcctcctgtgccgtatttgtgccattgtaaccttggcaattcatcaaaatactgttctgacatcaggcagtgcaggtgcagacatttaagccaattgctgccgccattctttgacgtagtcaatcagggcgcggagctttggtgcaatattgcgacgctgtgggaaatacagatagaagcccggaaattgtggaagaaagtcatcaagcagcgatacaagcttaccgctttcaatatatggcctgaaagtttcctgagtggcaattgttattcctccgccggcaagagccagcctcaacatcagacgcagatcattagtcgtaatctgcggttcaatcgcaaggtcgaaagttctcccgttttcttcaaatggccagcgataaggcgcaacctccggggactgacgccagccgatacacttatgggtatttcccccggaggcgagaaagcactctccacgcccggccgcaaggatcaggacgacgggggcaggcatgaatcctcctcctgatggagacgtacagaggcgacttctgccagcacggagagtgccagagtatgcgcatcccgggctttggggaatatcccgacgggtgcccggatttgcgttgtttcctccctggaccatcccagctcgtggagcttttgcagacgtaacgtgtgggttcgatagctgcccaatgcgccgagataaaagggttttgcttctcgcgcggcctgcaacactggcagctcccggttgagatcatggcacagcaaaatgaccgccgtatcggtatcgatctgagcgctggctgaggccggaaaaagatcgaagatatggctgtcatagcctgtggctgctgcaagactcgcggttgcctgcgcctcaagagaacgtccgtaaatcatcagcctgacgcatggcctgaaccccacctcaaagccattgagattccagcccgtccgggtttgcgtgggcaggcacaccagcgattgtgcttgcggatcgtagcgcagccccaccggttttctctgttccaggcggttcagcacggcgagcagaggctgtgccgagcgtagtttatggagcgtcagcgtgatcccaccgccgcagggcagaacgatgtcaaaccacggcgaaccttcgccatagcgaatttcgcgatcgcggcctgagcccatcatctccagcgcttcaaaagcggcagcggcctccacgcagccgccagagacaaaaccgcagtaacgaccatcttcgcgcaccaccatctgcgccccgagcgggcgcgccgcgccgccgcgtatctccaccagcgtcaccagcaccgctcctttaccggacattagcgcctctacggcgaagcgcagaatggtccggtggtcatcggtgagaaacgcctgctctggcttatgccagtgttcgtctttgtcaaaaagcgggtatgacattgttcctccttaaaccacatccggcagcttatcgagcagcttatccagagtgatgggataatcccgtacccgaataccggtggcgttatacaccgcgttggcgatagccgcgctcacgccgcacaggcccagctcaccgacacctttggccttcatcggggaggatatggggtcggtatcatccaggaaaatcacctcctgttttgggatatccgcatgaaccggcacctcataccccgccatatcgtgattaacgaagtagcccaaacggtcatccaccgccagctcctccatcagtgccgcgcccatgcccatagtcattgcgccaatgacctggctgcgcgcagttttcggattcaggatgcgtcctgcagcacacacagcgagcatacgccggacccgaacttctcccgtcgcgctatgcacgccgacctccacaaaatgcccggcaaaggtcgactgctggtactctttgctcagtgttccgaattcaatgctctcttccgctgtcagtctgccgcctgcggtggcttcatgtagcgtggcgcttcgggtaccgttggtaatcttgccgtcggcaaactgcgactgctcaggatcaaacccgactgccgaggcaatcatttcgcgaagcttcatacaggcggcgtaaacgccggaggtggaggtattcgcgccccattgtccaccagaacccgcagaaaccgggaaactggaatcgccgaggtgaaccgcaacctgctccagcggtacgccaagcatttccgctgccgtctgggccagaatggtgtagctgccggtgccaatgtcggtcatgtccgtttctacggtaacggtgccgttttgttcgaggtgaacccgagcacccgatttttccagcagattattgcgaaagcccgccgcaacaccgtggccgactagccactccccgtcgcgcacctgtccgggtgtggcgttgcgctgcttccagccaaatttatccgctccggtgcgcaagcactcgataagctgacggcgagagaagcagcgcgtcgggtcggcggggtcaacctgagtgtcattcaggatgcgaaactcgacgggatcgatgcccgctttttccgccagttcgtcgatcgcgatttcgagcgccatcagaccgggggcttcgccgggcgcacgcatggcgttcccttccggcaaatcaagcgtggcgagccgcaggccggtatgacgattcgccccggcgtagagtaattcgctttgctgtaccgccgtttccggcgtgccgccgggcaggtttccagaccagctttcatgtgagatagcggtgattttcccgctctggtcggcaccgatacgcaagtgctgaagggtggcggggcggtgcgtggtgttattgggaatagaggggcgggggagcatcactttaaccggacgtttcaccgctcgggcggcgagggccgccagcagcgcatcgcttctcaggaacagcttgccgccaaaccctccgccgatatacggggagataatacgcacattctccacgggaactttcagcgtttttgccagatcggtgcggcaccagtcaatcatctgatttgaggtccagagggtaagcttatttccatcccagacggccatcgaggcatgcggctccatcgccatatggctctggtccggggtcgtgtaggtagcatcaatcttcaccgcagcggaggtgaaagccccgtcaaagtcaccgacgtttttgtcgggcgtgtcttccggcggctgattgacggcctgtttttcgtccgccagggagtaagctcctttattacggcgatagtgtgcctgcaccagcgaggccgccgctcgcgcctgttcgaaggtctcggccactaccagcgcaatggcctgatgatagtgctcaatagtggggccgcctaacagcctggcggtgtttttgtcgcctttgccgagtgccccggcgttactggcggtaatgacagccagtacgcccggcgctttttgcgcggcgtccgtatcaagggcggtgaggcgtcctttggcaatggcggaaccgacgatatagccataggcggcgttgggggcttcttcatgccattcgtaggcgtagcgtgccgtgccggtagttttcagcggtccgtcgatgcggtcatggggacgaccgacaaccttcagctgatcgatcgggttttcccctgcgggtttatcaaatttcatgcctgtgccctcgcttcagccagtacggaggcaagcgttcgcttcgccaacaggagtttaaaggtgttttcagcggtgggatgggcgctggcgaacagcgtgtcatatacggcctgcgccccctgggatagctgagcatccgcagcctcaatgcgccagggcttatgtgctactccgcccagcgcgacgcgcccgctgccgtcaggctgaataatcgccgcgaccgataccagggcaaaggcgtaggaggcgcgatcgcgcaccttacggtagatatgttttccgccgagcggtggaggtaacgtcaccgcaacgataagctcaccgggaagcagggcggtttcaatgtgcggcgtttttcccggagggtgataaaaatcagccagtgtgatactgcgagtctttccctccggcgtgatggtttccaccaccgcatccagcaaccgcattgcgaccgccatatcgctcggatgggtggcaatgcaggcttcgcttacgcctaccaccgcgtgctgacggctaaagccttcaagcgccgcgcagccgctcccgggcaggcgcttattgcagggctgattggtgtcgtaaaaataggggcagcgcgtgcgctggagcagattacctgcggtggttgcctgattacgtaactgaccagacgcgccagcgagcagggcgcgggagagtaccgcgtaatcacgacgcacgcgctcgtgagccgccaggtcggtgttccgtaccagtgcgccgatgcgcagcccacccgcgtcggtcacttcaatcttatcgagcccgaggccgttcacatcgataaggtgggtgggcgtttcaatttccagcttcatcaggtccagcagattggtcccgcccgcgataaattttgcgccgggtacgcgctgagcgctaagtgccgcctcggctggggtattcactcgttcataggtaaacgccttcatgattttatctcccccgcagcatcttcaatggcggcaaggatgttagcgtatgcaccacagcgacagatgttgccgctcatacgttcacggatctcatcggcagttgtttctggagcggaaaccaaatcgaccgtgacgtgactgggaatgccgtcctgaatctcttttagcaccgctactgatgagcaaatttgcccggaggtgcagtagccgcactggaagccatcatgcttgataaaggccgcctgcatggggtgaagattatctggcgaacccaggccttcaatggtggtgatctcggccccctgatgcatgactgcaagcgtcaggcaggcattaagcctgcgaccattgaccagcacggtacaggctccgcactgtccgtgatcgcaacctttcttggtaccgatcaaatgcagattttcacgcaaagtgtccagtagcgtggttcgggtatccacctcaagctgctcggttttgccgttcaccttcagtgtcaggggcattatctctggcgcgggtgtagctgccggaacgcttgccgccagcgtagaatgaggataaaccacggcggtcgccgctgttgcggcgctcactttaatcagatcgcgacgggtcaaacttaaatcgtgcggctcgtgcttcccaacccgattatcttcggggtattcgccttggttgctcataccaggcctccggtattctaaaggggaaaataagagtgcgttgcgagagtgctgatgcttttttaaacgttaagcatagtcggcgacagcaggaggattattcttaaaacgcgaatgcagctatgagcccggctaataaattcatgttcgccgggatgttgatgatgatgggagctggtttattgctttagttgtacgatgcaaaaaccaataaggaaacctgtgattttcagctctacatcaccctgcaaatctctgtcacttctaatataaaaatagggagaaatgatggagcttatattcattggcgattaggaaactatcttgttatacaaaacaatacagttctttacatttgccttgttttatgaatactcctgaagaggtgtataacataatggtacaagcagggtagatatgaatatatttgaacaaactccaccgaaccgcagacgttatggtcttgctgcattcattgggctgattgctggcgttgtttccgcattcgtgaagtggggggctgaagttccattgccgccacgtagcccggtggatatgtttaatgcagcgtgtggcccggaatcattaatcagggctgcaggccaaattgattgctcgcgtaattttctcaatccaccgtatatttttcttcgagactggttggggctgacagatcccaatgcggctgtttatacctttgccgggcatgtctttaactgggttggtgttacgcacattatcttttcgatagtgtttgctgtcggttattgtgtggtcgctgaagtatttccaaaaattaaactctggcagggcttactggcaggtgctttagcccaactttttgttcatatgatttcattccctctcatgggactgacgccacctctgtttgatctcccgtggtatgagaatgtttctgaaatttttggacatttagtctggttctggtctattgaaattattcgcagagatttacgaaacagaattactcatgagccagaccctgagatccctttaggctcaaacagataatgcattgaatgataaaaatggcgcaaatacagcgccatttttataggttaaaaacattgctttttatattctgatgcagatagtcagtgagtatatcgcgctacttcaggatgatgtagatccgaagaacgctacagaagagaggcattgttgctggcaaatagaagaagtatcgggttttgttacccctgaaaaacgaagccccgctattatcgctggcggggcagtgcaattaattattgtatgtttataacggtgtcagcccgtatttagcccttgcacgattgcaagcctcattgacgactccgttctcaccagacatggcgaattctctgcatgtggacgatcgatttttatatatcgtgcagcaggcatttttgcccggggttcctgcaagggcaatacatcgggggtttttctgattggtaccgctcatgcatcggtgaaaaggggatatttgttcagtgagcctggcgggaatagtaccgccagcatcgtcggcttcggcccagtaaaaagagacgcggaaaaatgcacaacaggcaccacacgtcatgcatggattcagattgctcataattcaccagtacagctaaaaatcgtaaagagaacagcggtacatcgtatgtaagaacgtaccgcggttggctggggaactttcgatagtgtgagtattgaatgatttccagccgttaccgattttacgtactaattcgtgattaaaccactcgttagcaggctgcctgatacctttccgtgtctcctgaacactatggtgtgcatatgagaaagcccatcgttacaggtgatattgacgatcgcttccacatcatttaaacgatttttggggctctgaggtggaattcttccctcgaccgatggataagtcttagtccgccgaagggggcttagccggacaggaatcgctaatcttaatgaatttgtcgttatagaccagatagtgattccccggctgacgtaactcaggctgatgaaccacgtctcccggacgtagataccaggcatcgccttcctcttcggtcgaatcacatcctggcttaatcagtagcttaaaccatgtgttgccagtgttacttaccgttcctgtcaccttgtcgaaggaccatttaaactgaacctgacgtggtcgtactaccagaatggtatccatcaccaccaccggctccgtgctgaccacgccgccggttgggctgcgtcttgtatggttacgagtggggacctcgcgaaatgagacccggtagtagcgctcgcggttatcccgtggaccatgatagtaaaatttaaaatactcgctctcaccagcctgcaacgccagctggcggggggcgaaaagcagttcaccatccaccggtcgggtgcgcaattcactgctgcccgggctatcaatagcactgatggcaatacggtatatccgtgcgcttttgttgttattcactacacgtttgctgacaaagtcagtctcggacggcagcgaaaatgtcagattgccgaccgaaatcgcctgtgtcaaaggtgccgccagcatacagaccgctgtcagcagggccttagttaatgttacgccacgtcgcctgaacatgaatctctcctgaagcgctgacttcgccaaaccagccgttatcatctaccgtacgcagcgaaatggcgttatccattggaatcgaaaatttgactgtggtcttatccatctgccccacttcgccagagatatcagtccacggtgtggtcaaccacagcgcatcggtcatatcccgccagctatcatcgcacccggcatcgtaggtttttgtagctccgttgcgggtaataaaggaaagtgtcgccgggaacggtactttcgccttaccgtcatcggagctgaagacacaataggagcgcccgccaatcacctgcgcgggtccggtcaccttgatcagcacttcgtcggcagctgttttaccgctggtggttacgatatagccgaaatcgagtgccgactcgccgctgccaacatatccctcccgcgacggtgtctgagtatattcatcggagataatactgatgctgaaatcacggggtttgataatcagcgtgttggaggtagaaaattcataccagccagactccggtgatgtggtgttctgaaagcgaaagttgaatagatctttggtgttgatatcgctgatcccgaggttcaccatctgcttaaagaagttgctcgagaagaaaacatagatcgagtctgcgctcttcatctcgttgaaggtgtagtaataggcggtattgctcaccggtttccatgaactgccattcagactgaactgcatatcgtacgccccgacggccgaggctaacgacgagttggcgatcgccgggaatatatggattgaggtgttgctgagtccgtttgtttgcagggtatagttaaccatcttacaacttaatcctgaacggctgccgatggtttgcgtccggcagtcggcgttcccttcgcccagagtcggtactccgtcgctgttgataaatacttccgccagcgagtgggtatttatcaaccgtagatttgctgctttcgtatgggtgacgttgcgaacataccagttgccggaggcctgatccttacagcgtgcgccgctgctggcgtcatagttcacagaggtctggcaggcattgatggtcattgtaaagctgctgccgacgggcatttgttgcatatactggtaaaacgcgtctgacaacatgccgtgcatccacttcgcgccgccgctggtcaccgtcgcgccataaaatccactggcgtcggtggtttgcggcaggataagactggtggtcatattacacccagcgtaccagttgatgcagcgcaagccagttaaaggagatgaaactggtgaattttccagccacatatcaaacttccagttggtataaaggccggtgttgtaaccgttatcaatgtagccgaggctttgctgatagatggttcctgaaccagtgtattttaaaccggtccagcggttggcaccggtcaggcgcggatccagcgccccgccaggagtgacgaaaaagttgtcgtctgagttgttttcgacaaacacaaactcgcgtgccggtgcatccgcccaggttgttttgctcactgccgctctgagcgcagttactggccagattagcgcgaaaattatcatcgttattagtaggttaactctcattctcttctcctgtctgcgtcaccgccgcccacgatgagaggccgctgcagaccacatcaccgacccagacggcaccgcgcgcctggttgagttccagagccacttcgcaggttttattgccactgtagcgaaaatcgatagtggggtatttcttatccacgtccatgacaaactcgccgttttcatcggttcgggttcggccgatatggttgttaatccgtgcgttagccagcagtgtgccgtcttccgcacggatacgaccggagacggtaaccatctgcttcacctctggctcaatgacagcgacattgcctggatagagagtcagacgacttttgcggccgctgacgatatcgtaactgtcgagtgagtttttgctgttctgtaactccacctcatatcttccatagggagagagcgggagatagttacgcttgccgttaagcgggaaaatccgcccgttgattttggcgctgatctgaccgtcgtcctccagcccggtgttgaatatcaccccagcgttgccatcagtccgcccgctggcagcaatgtttttaccctgccagccgacgctgccattggcggtcaagttggtattgacgtagccgtccgccgcgctattgacgttcagcgttccgctggcgtaacgagcgtcgaattgtgcatacgccccgccgctgagggttttgtcatcaccggtatcgccggagatggcacgtgacagattggcaccaacagtgcgaatggttccttcatcaaactgtttgcgtgctgacaggtttgccatggtgtagccgttttgatgagtcatccctgcgctaaaccagttgcccagtggtagcgagagatcgagagcgatatattttcctgtattggcgttgctgtcgccgttgttatagcgctgaataccggcccgcaggccaagcgaaccaaaggtaccgctgtagacattttgatagtaatctgccgtgtaataatggctgttgtaacggcggtcatcattgtagctgatgctgaatgtgcccagcttcgaccacagtgagttcaggttgagtgtgccgccgattgcacggttgtcggcatcgctacgtcgcaattgattgccaatgcgggttttttcctgattaacccacagcgaactaaagcctcccggtagagtggcgctgatgctgccgatgctgctccatgagctgtcactggccagcatattttgcaggttaacgttgatcgcccccccaagcggcagcgtcagacgggtttcacccaccgcctgattatcgtatccatatcccgttgccgcccagctaagcgtactcaatgagccggaggtcgaggcacctgctagccaactctctttagctggtcgcgtctttttcccgttttccgaccagcgatccatatgaaagctaccgccccatacctgccacgccagtggtgcaccgacgccgcgcccccggctaaacagcttattgacccgctgggtgcgtttgctgatcacgcgaccgttaacgatcacctcaacttccacatcgtaaatcccgtacggtagaccccgggtatccacttcatgattgcccatagtgaagttctgaacgcttagtagccgcccatcacgggtgagatgtacttcgcccgccgccggtaaaaaggcgatcactggcgtggctgactggctgctgtcgaagatggtggagctggcctggtttccccaggaaaggccgtaaatcttccctgctgaaatggcggtcatcggccctaaggactgcaagttccaggtgtcgagcattccaccggcaaatcggtgaccggcaaaatcgcgttcatacatcgctttatataattcactgtcctgttgaccgctaccgatcccgtacagcgagccgtcgagcaccacatgatgttcgcgcagtgcagtaacgttattcagcgacagatagctggatgtgttgctcccgccgttacgcaactggttgttatagacgcccaagttatagctcagattactgctgagggtgttaacactggactgcccgatgtcttcgctacgtgagcgtagtacggtgcccagcgcttcgcgcttgaccactagctgcagcagcagttggcgcaagctgagatccagctgcgcgttgtcagtcagggggatggtaagggcctcattgaacggggcgttggccagagccatcagctgctgtcgagtttgttcgctgacactggcgttatcttcactctcttccagctgtattttccggatgcgtagctgtccatcgtccagccagataaaagcgctgccgattcgctgatcgtcctggcgaccctggctaccggcgagatgaatatagagcgggacgctcatgccgtcctgaagcgcctgactgaaggcctgcggaataatcaccccacctatttgctgcgcacttatgtcagcagcgctggcatcgggctgaacgaacaaaaagaccatgccgaaggcaaactgggctttcagtcctggggagaaccgtcgtaaaggcattgtcgttatccatctgcacagctatctatttcacgggaatgaacttatcaccctgccaaagtgcaacccgtcctttgttatccgcagtgtccacgcgggtaaaacgacgcgacttgcccggcatcaggtagtaattctctttacactccttaccgttggcggctttcaggcaaggtccgtaggcgaggatccgcagcgtcgcatttcctgtatttgtcagggagccgttggcgtactgaaagtggtagttcgcctgacgaggggcgacgaccagaatggtgccgatgcgggcggaagcagtggccacagcgctgcggttggcattatcgcgctgcgcatcactgagggcctgatcaaaccagacaatgcggtagtagcgctctttttcatctgcgggtcccttatagaagaagcggatcacttcgctggcttgggcgggtagcagcaagctggcgggagtgagtagcaactcatccggcttgtccattgagataacctgcccgtcgtcaagcggtgaagagagccgttcgagacggatattgataaggcgaccactgtcggtactgtttttgatcgttttgctcagcgtgctgctgtcactgttcataaacgatgatatatcgccgacatccagcgcctgggccggagatattccggaaaacagcagagcgagaggcagaaggtgctttttcataacaattccgtccaggaataaagcaggggggctacccctgctggtacatcagagagattaactggtccaggtcgcgtcgaactgtacgctaacgtcgccgctccagatgccttccggtagagtgctgtaatctgttactgcggtggtaccattggtggtaccgctgatgatggagaaggtgaaaccatcctgtgcggtggtacgattgctggcattgtaaccgttagccagcgggctaaggttgccgcccagtacgccgttggcggtatcgatcatcacggtatcgccagttttttcgactgccgcgccgttataatccacgcccacattcagtgtggaacctgaggtatccaactgggttaatgtgttggtgataagacgtgaggtcagtttaaaggcggtagccgttgagtcaccctcgatagccacgtcaaatagacctttctgtgagttaaaacctttaatgccttcggcatactggaacgccaggctaccgagtggcgtcacaaccagcttactggtggtgtcttttttggctgttgccgaccaggtcgctacagcctgagctgttacgtcagcagcctgcgccacacccatgccggtaaacaccgttaccagagctattgccagaaccttttttttcattgcatttcttcccgagttgaattgaggacgtgatgtcccagtgagtcattttttaaaactaacttgcctggagtttactgaaccaacttatatatttttgagtacagcttggcctcagcattacgccgatgggtatacactgtcttcacactacaattttcaattctggcaatcgatttaggttgcattccctgggccgtcatgcggataatttccatttcccggtccgtgattttatctttcttaatatcttttctcaggaacctgccattaatcacatagaccagttcttttctaatatcacgactcagtccagcgtataccacgcccctaatattgctattgtaataccaataatttgctaaggcctctgactttctggccgcaatcaatacgacctgtttcccctttaccgcggataaccattcattatcacggtttataaattcagataaagaatccgtactgagattgataaacacgaaatcttttctaattttctccaacgatagataaattaatctgtcgatatccacaatcagttcagatagtcctttatagaagtaggcgtcatggggagaccagatgtatttatcagaacggttttgacattccatatggtttttaacctcatagtccctactgtaatcactttgccatgtcactactttccaaacctgtaatttttacaggtgcattcagtttccttagtaaaccggaagtaaataagatacgtagtacatatcaataaaggttaaacgagattaagtttaattattttcgattgggcttaaatttatgttttttttcccgatgagtgtcaatatgtgaacggaaaaggaattcaatggttaagtcaatatttagaaaaactgaaaatattgcttttttgataagaagaaaaagacatttggtttcataaggttattggcaatataacgttcaattcttacttgcattttatattggtcaggaactttgccctgaagtgttaggaatagtcttaatgcgctgtgtgatggactagtaaaaaaacaagttttaagggtaagggatagaatataaaactatgatgagctgtcattgaagatgatttgccaatcagtaagatattttaatggattaacatgccgcacaaaatggttacaggtgttcattccaataagtaatggaaaattgaacgggcgtatgtacgtcatctgttcggtaagcccccaagagccagattaagtgaagttaaacgaaggctgccagctgtcacaggaacgatggcctttttgtcagggcactgcattcagttatctgtgcgcgttactctaactggcactcgaacgtcggcgacggggttaccggtggatcagactgttcctgtggcgtaaacgtttttatgttagtaccaacagatttaccacatttatcatcttaacagtttgagtgaaaatgcaggctgcgccgcaaagggaggagactgagtggcgtgttcagtctaaaagagggttgatgccagcatacaggggcgaagctggtcaacaagtcaacattaagataatggaatattcggagagaaacgtcaggcagttggcctcaaatgaacaggaagaatatatccccaggaaaattaatgttggtgttataaacacaccaacattaatccgatctgattattaatcagacaaatatcgttaatccgtcgaattttgaatcaacgttttttcttacgaccctgaacggccttaaaacgtggattagatttacaaatcacatatagccgtccttttcgcttcacaatctgacagtctggatggcgttcttttgcggtacgcagagagttaagaactttcatcacgccccctttttcgtgctaacaaaacgaccaaaacgttgggtgaatcgtgcaacatttccttctgatgccactgttctcagcttccctgtatagaacgggtgcgatttagaagagacatcaattgtcacgtatggatacgttacgccatccagctcaatctcacggtctgttttgatagtcgagccgattttaaagtactcatcaacactggtgtcgtggaacaccacagtacgatactcaggatggatattgggcttcatcatttttacctgttatgttataacataaccataaagatacatgctcatccggatcatttcaacactcaatccctgtgactctttgtggatgtggaattttcgcaacggggaactctggcattgttagcagccattggtgacgctcccataaacgcctggatgagtgattgatgatggttttgctgagagtatggatttttcgagaatggaggttatctccactttactggccgataatttatcgcagtatgattgattacctgacagcgtgtattcctctcccacggatataataattacttacaaaaaagggagaggatgcatattttaaatatcactgaagtgaacagtttatttccgttattaatagaaatggagaaataaataggcgtattctacaattgcgacaaaaacaacgatattaatcagtttatgactgatttgctgtactttattctctttcattggtacttcctcgctttaaaaaagagtgcacttcgtaagtgcccttatataaataacgagtttggtcaaccaattttttgacatgtatcacaaatttgaatagatgtattacatcaactatcttttattgcaccaacgtcattgatatatgtcgcctgaagtcagttccgggaatgagtctgatctcaagactggcccagtccgggcgttgattggtgctgaggagcatatcgcatctcatcataatgtcgtatctcctggggtgttatacaagatatcgttgttggtgacctgggagaggaattgagttctattaaaccgtcaactatgccggatacatactggattacactgcaggcacgccttatgagagaacgtgccgcagtgacgggttaattatctgaaagaatttgtgaggctgtatcggttactcattgatttgatagttttactctcgggagaataatagatatttaatccattaacggaaaccagccagttcctttcgatgcctgaatttgatcccatagtttatccggaatggttaattcatgaacaagttgtgttatcgttcatgagaagcataacgtaaagggaaaagctcgattagacggcagaatttgtcaggggttatgaacgaaattcataaatctgtttgagtgttgcgatgggtagtgcaagttcgatatctccgcaatttacagtccgatgaaggaaaatgaatatccataaaaaatatattggtttatcctggcatatatacctatttcgacgtatttccaatagttttaattaaaggcaggtcattgttattcactctgaatagtgaattattcactgtccgcagagtaagaaatataacttaggtatctatttaatgacttgcacaaaaagctaaattttcccccataaataaaaatataatcccgcgcccaaccacctgatgagtggctataggcactggatatattaggtggcggtgcactttcttacataaaggtatttccttttctgcggaaaaggaaatcgggaaatccccggtttttctgacaagcagacgccattatttgtgtctgcctatgttcgttaattcgttcatcaggaaattatctcaatgtcacattataaaacaggtcataaacaaccacgatttcgttattcagttctggcccgctgcgtggcgtgggcaaatatctctgttcaggttctttttccactcgctgtcacctttaccccagtaatggcggcacgtgcgcagcatgcggttcagccacggttgagcatgggaaatactacggtaactgctgataataacgtggagaaaaatgtcgcgtcgtttgccgcaaatgccgggacatttttaagcagtcagccagatagcgatgcgacacgtaactttattaccggaatggccacagctaaagctaaccaggaaatacaggagtggctcgggaaatatggtactgcgcgcgtcaaactgaatgtcgataaagatttctcgctgaaggattcttcgctggaaatgctttatccgatttatgatacgccgacaaatatgttgttcactcagggggcaatacatcgtacagacgatcgtactcagtcaaatattggttttggctggcgtcatttttcaggaaatgactggatggcgggggtgaatacttttatcgatcatgatttatcccgtagtcatacccgcattggtgttggtgcggaatactggcgcgattatctgaaactgagcgccaatggttatattcgggcttctggctggaaaaaatcgccggatattgaggattatcaggaacgcccggcgaatggctgggatattcgtgctgagggctatttacccgcctggccgcagcttggcgcaagcctgatgtatgaacagtattatggcgatgaagtcgggctgtttggtaaagataagcgccagaaagacccgcatgctatttctgccgaggtgacctatacgccagtgcctcttacccagcaatagtggacacgcggctaagtgagtaaactctcagtcagaggtgactcacatgacaaaaacagtatcaaccagtaaaaaaccccgtaaacagcattcgcctgaatttcgcagtgaagccctgaagcttgctgaacgcatcggtgttactgccgcagcccgtgaactcagcctgtatgaatcacaactctacaactggcgcagtaaacagcaaaatcagcagacgtcttctgaacgtgaactggagatgtctaccgagattgcacgtctcaaacgccagctggcagaacgggatgaagagctggctatcctccaaaaggccgcgacatacttcgcgaagcgcctgaaatgaagtatgtctttattgaaaaacatcaggctgagttcagcatcaaagcaatgtgccgcgtgctccgggtggcccgcagcggctggtatacgtggtgtcagcggcggacaaggataagcacgcgtcagcagttccgccaacactgcgacagcgttgtcctcgcggcttttacccggtcaaaacagcgttacggtgccccacgcctgacggatgaactgcgtgctcagggttacccctttaacgtaaaaaccgtggcggcaagcctgcgccgtcagggactgagggcaaaggcctcccggaagttcagcccggtcagctaccgcgcacacggcctgcctgtgtcagaaaatctgttggagcaggatttttacgccagtggcccgaaccagaagtgggcaggagacatcacgtacttacgtacagatgaaggctggctgtatctggcagtggtcattgacctgtggtcacgtgccgttattggctggtcaatgtcgccacgcatgacggcgcaactggcctgcgatgccctgcagatggcgctgtggcggcgtaagaggccccggaacgttatcgttcacacggaccgtggaggccagtactgttcagcagattatcaggcgcaactgaagcggcataatctgcgtggaagtatgagcgcaaaaggttgctgctacgataatgcctgcgtggaaagcttctttcattcgctgaaagtggaatgtatccatggagaacactttatcagccgggaaataatgcgggcaacggtgtttaattatatcgaatgtgattacaatcggtggcggcggcacagttggtgtggcggcctcagtccggaacaatttgaaaacaagaacctcgcttaggcctgtgtccatattacgtgggtaggatcataaagtcctcgggtcgttgtccactcttttggcatgtcagcatattcacataccgtaccagcaaaagtttcaaccgtgagcaaatcgaccgattttgttgacggttcaaacgtggaaacgaaatagatatccgtcttaaaattcttcatacatctggctaaatgatgacgtcgtagtttgacttcttcatccggtgatttattcgacacttcaatgtcatatttaaatgagttgccaaaaataggtgtctcaggaaagttgattaatctacactccgtcttttgctgttgacgtattaaaaaagaagggaagatatttgcgagatcccaataatcacggtggcggtattcacggggagagcagccgaataactttttaaattcgcggctgaatgactgctgtgaatcaaaatgcaaagagagtgcaatatcaagcatagatttcgcggtgagccggacaagaatggcggcacgacaaagccttcgtttgcgaatgtattctcccaaaggcacatgcatgaaatttcggaacagaagctggatgttgcgtctgctgtagccagatttctgtgcgatatcttcgattgaaatagggtgctcaagattgcactcaatccactccaggagctgctgtagaatcttctgcctgatcatctcattctccgttaattctttgtcatatcgcacattttcgttataccctgggccctaagtgtatcaaaaatagcaagggcgaaggcaaaagcactggtagcgtctgcttcgttgtccccgaaaatagagaggtttcagtcctacattattaatgaattttttgcataagtgatatcaaaatccacatactactttgaggttacgttttaacgtagactcattgttcatgcctaatggagggactgacagtggaattttccgtatagtctgcttcagagtattgcagatgcccatcaaaaatcgatttctcactgacagataaagaaatggcacaaattagttcgcttgatttgggttatgttggggagtcggtaaaacattttaatcctgaatttgttcgtggttgtcttgctgtaaaaatacatgattgatattaatcatgtattttacctaagacgacaaaaaccttttaacagggagtgatattgatcttcactctgtcatatctccggtaatatggcgtcaggcttcatcatcagaaagggggcctgacgcctgaaaaagtgaacaacagacagtgttcggattatcaatattcagtttttaacgttgaactggattcattactgcgttgtttaagaatttcccgcgccgaatctgccattatcatgactgcacctgccagcatcagagtatctttcaataccaggcgaccagcaccggataaataagggaaaccatgatgagcgtcacccaatgcgggtacccatgcctccggggtggtgattaaaaatgagagtgttaccagcggcgtggtaaatgccatcagtcctcccaataaacctaaccagcgattgacaggattagccaaaaccagcagagcaataatcacctccacgacgccaagaccgttggaaaaaccataggtattattggccgtttgccatgcccttgcttctggtttgtattcgccttcgtgagtcagatactgtttatagtcttccgggtgttcataaaagaacgacattagtggactgtttgcgacgaatggtgtaatgctgtctgcctcgtaagggacaaactttaataacccaatccacataaaaacaattgcaatactcagacgaatcaatgtcaggccaattttatctccccgacttaacaggtgcaggtatttttccattgtgaacatccttatttatacaatactgctgttgcggttgaattattatcaattcgcatcgatgtgactttccaggatgaagcattatattttctggctatatcagcaatggtatcctccagaactgtcggtgatgctgatactgacgagacgctgatatgtttcagaattattttatcatctgcattggtggaaaatgccataacgccagataatagtgttgcaaataaaacagattttttaaacatataaaataccatcaatgaagtgattaagaagttatagagtaacagagaattaataagattcttttctctgagacgccagaatatttgttctggcgtctgattttgagtttatttgactaatgaaaatagatcattgagtgattcgctcatcgacggatgagtaaatatctgatcgcgtaatatgctataaggcagcccggcatccatcaccattttcactatattgatcatctcgtgggagtcaacacacagcagtgatgcccctaacatacgttgggttttattatcaacaatcgcttttaataccccacgagtatcattcatcactctggcacgcggaattgcagctacaggcaatgtcaccacctgaatatcagcaccactctctctggcttgttcttctgtcataccaaccctggacaggggcggtgtcataaatacggaataaggcacatttttccgatcatcagtactacgtttgccttcacccagtaactcatcacgtacaatgcggtaatcatccagtgatatgtaagtaaattgcagcccgccggtaacatctcccatcgcccaaatattgtctgcggtggtatgtaatcgcttgtcaacgacaattgccccgcgctcgtttactgcgataccggcattttctggatgtaacgaagcggtagccggttgacgaccggaagctattaacagtgcatccaccgccagttgggcgtgctcgctatgcacttgcacttgattttcatggtgactgattcgctccacatgggcattgaggataatatcgacgccctgatcgcgtaaaatcgtcgcgatattatcagcaatatcccgatcttcccgaggcaaaaacagcgaagctgcttctaaaatggttaccttgctgccaaaattagcgaacatagaggcgaactcaacgccaatatatccgccgcccaaaatacctaaatgcccaggcaattcttttagattaagtaatccggtgctgtcatatactcctggcgtggtggtaattccaggaattggcggaaccacggtttgtgcaccggtattaataaaaattttctcgccatgaatttccagatttccctcaggccgatgaacacgcaggctatgattattgataaactccgcctggccgtcgatcacgtcgatattgggcatatccgcaagattatgaaaattcttattacgtaaaaaattaaccacttcatttttacgctgtatggcacggacaaaatctgtgtgctgctgtgcgtcatgaaccaatgttttggttgggatgcagccgatattaatacaggtcccgccatacattgcatttgattgttcgatgagagccactcgccaacctgcttttgccagcgtgacggctaatgtttttccagccttgccaaaaccaataatcactgcctgatatttattcatgatgatttcctgtcgaaacgcgttcatttgacatcatgactatagacgcaaaagagcaaataacatttcttcacaacgcttgatattttgtcttatcgtctgatattttctttttcttaatcagaatcacaaaacaaaaatcatgattaactatttgatggtattagattagttatttactaagattgttggtgtttgtaatcaaaaaccactcaggagtctgatatggatgcccttagccgtttgttgatgcttaacgctccacaaggaacgatcgataagaattgcgtgttaggaagtgactggcagcttccacatggtgccggggaattatcggttattcgttggcatgcgttaacgcaaggagcggcgaagctggaaatgccgacgggggagatttttacattacgcccgggaaatgtggtcctgctaccacaaaattcagctcatcgcctgagtcatgtcgataatgaatcgacctgtattgtctgcggcactcttcggttgcaacattcggcgcgttattttttaacgtctttgccggaaacgctgtttttagcaccggttaaccacagcgtggaatataactggctgagggaggcgatcccgtttttacaacaggaatccagatcggcaatgccgggagtggatgcactgtgtagccagatctgcgctacattctttaccctcgcggtgcgtgagtggattgcacaggttaatactgagaaaaacattctcagtttgcttctgcatccacgtcttggtgcggtaatacagcaaatgctggaaatgccaggacacgcctggaccgtcgaatcgctggccagcatcgctcacatgtcccgggcaagttttgcccagcttttccgtgatgtttccggaaccacgccgctggctgtattaacaaagttgcgtctacaaatagcggcccagatgttttcccgggaaacgctccctgttgtggtgatcgctgagtcagtaggctatgccagtgaatcatcttttcacaaggcgtttgtccgcgagtttggttgtaccccgggagaatatcgggaaagggtcagacagcttgcaccctgaataaaaccgccagaaatcagggcaaagataatccgcattccgggagttgtgagcctttcaactatttctatttccaacggtggtttgggctttatatattttttctgatggactctagctcagtttttaaataaaaatgcaaactaaattgcttcaattaaataaaatcccgactattacttgatacgtgattattgtcggtgatttttttgtacaccatcagtgtatatctcaataacccctgaataagtagctctgaataggtataagggatgtagccatttttaaatggatttcttatgccaaaaatgatcgtcgatttccccataaaatgtgagcgatgccgaaagaaataaaattagttattgcatttgacgtttggatgaaagattatcatttgtcatacaaatgaggggtggtatgttgctagccaattaaaaaagaacgccatatttattgatgattgatcccccggtgggggggaaacatcgggcataaatgggcatgaagtaatggagtattagttgtgaatgtcaatttctttgtcacctgtattggtgacgccctgaaatcaagaatggcacgagactccgtgctgctactggaaaaactcggctgtcgcgtaaatttcccggagaaacagggatgctgcggtcagcctgcgatcaatagcggttatatcaaagaagcgattccagggatgaaaaatctgatcgccgcactggaggataacgacgatcccattatttcaccggctggctcttgcacctatgccgtaaaaagttacccgacgtatctggcggatgaacctgaatgggcatcacgtgccgcaaaggttgccgcgcgtatgcaggatctcacctcttttattgttaataaattaggggtagtcgatgtaggtgccagtttgcaagggagagcggtgtatcacccatcttgtagcctggcccgtaagctgggagtgaaggacgagccacttacgctgctgaaaaatgtgcgtggactggagctgttgacctttgctgaacaggatacctgctgcggatttggcggcacgttctcggtcaaaatggccgaaatatccggcgagatggtgaaagaaaaggttgcgcacctgatggaagtccgccctgagtatttaattggtgctgacgtgagttgcctgctaaacatcagtgggcgattacaacgggaagggcagaaagtcaaagtgatgcatattgctgaagtgttgatgagccgctgaggatataaagatgtcgatcaaaaccagtaatacagattttaagacacgcatccgtcagcaaattgaagatccgatcatgcgcaaagcggtggcaaacgcgcagcagcgtattggggcaaatcggcaaaaaatggtcgatgaattggggcactgggaggagtggcgcgatcgggccgcccagatacgtgatcatgttctgagtaatctcgacgcttatctgtaccagctctcagaaaaagtgacgcaaaacggcggtcacgtctattttgcaagaaccaaagaagacgctacccgctacattttacaggttgcccaacgcaaaaatgcccggaaggtggtgaaatctaaatcgatggtgaccgaagagattggtgtcaatcatgtgttgcaggatgctggcattcaggtgattgaaaccgatctgggtgaatatattctccagctggatcaagatccgccatctcatgttgtggtcccggcaattcataaagatcgccatcagatccgtcgagtgctacacgaacgtctgggctatgaggggccggaaacgcctgaagcgatgaccttattcatccggcaaaaaatccgcgaagatttcctcagtgctgaaataggtattaccggctgtaatttcgcggtggcagagaccggttcggtatgcctggtgaccaatgaaggtaatgcgcgaatgtgtaccacgctgcctaaaacgcatattgcagtgatgggaatggagcgtattgcccccacgtttgccgaggtagatgtattgatcaccatgctggcgcgcagtgccgttggtgcacgtttgacgggatacaacacctggctgacaggaccgcgcgaagctgggcacgttgatggtcctgaagagtttcatctggttattgtcgataacgggcgttctgaggtgctggcctctgaatttcgggatgtgctgcgctgtattcgctgcggggcttgtatgaatacttgtccggcatatcgccatattggcggtcatggatatggctctatttatccagggccaattggtgcggtgatttctccgctacttggcggctataaagattttaaagatttaccctacgcctgctctttatgcacagcttgtgacaacgtgtgtccggtgcgtattccgctgtcaaaactgattttgcgtcatcgtcgggtgatggctgaaaaagggatcaccgcaaaagcagagcaacgggcgataaaaatgttcgcttatgccaatagtcatccaggattgtggaaagtcgggatgatggccggtgctcatgcggcaagctggtttatcaatggcggcaaaacaccactcaaatttggcgcgattagcgactggatggaagcacgcgatcttcctgaagctgacggagagagtttccgtagttggtttaagaaacatcaggcgcaggagaaaaagaatggataatcgaggcgaatttttgaataacgttgctcaggcactgggtcgcccgctgcgacttgaaccgcaagcagaagatgcgccgcttaacaactatgctaacgagcggcttacccaacttaaccaacagcagcgctgtgacgcgtttattcagtttgccagcgatgttatgttgacgcgctgtgagctgaccagcgaggcgaaggcggcagaagctgcaatacgtctgtgtaaagagctgggagatcagtcggtcgtgattagcggtgacacgaggctggaggaattggggattagcgaacgtttgcagcaggaatgcaatgccgttgtttgggatccggcgaaaggtgccgagaatatctcgcaggcagagcaggctaaagtgggtgttgtgtatgctgaatatggtttaaccgaatcgggaggcgtggttcttttttccgccgccgagcgcgggcgttcattgagcctgctcccggaatattctctttttatcctgcgtaaaagcactatcctgccgcgtgtagcgcaactcgcagaaaaattgcatcagaaagcgcaggccggtgaacgaatgccttcctgcattaacatcattagcggccccagttcaacggcggatattgagcttatcaaagtcgtcggagttcatggcccggtgaaagcggtgtatctgattattgaggattgttgagagagatatgaagtctggacataaacctgaagaaggcatacgaggttgaaaatagcgtttaggacaacctgacttaaccccgttccgtcatggttatgctgctcttctgtaaatatcctggtattaccaatgccaggatatttacagtgaaaaagacaggcatccattcctgaaaacgggttcccttcccggtcattgtcacttcagctttatacaggcactctctatcagaatgttgtttattactgcccagagttttgttggtattcatctaccatttttttgacaaggcaaaacattacagaaattacaatgcttagaaaaaatcccagagccaggcaaatggcagcagggtatttattttttatttctggtgagcttatagttacacagccatcaccgttcggatacaatgaccagttcctggtcaggtatatcatttttgtataaagctcactgttaattgctgaaggcgtttgtatctcatcgagaacttgcctgccattatgatattctgacgcataccatttgataatagaggcctgcacgcgagatatttcctcttcagcagttggtaaagctctcttatctcctgaccattccagccttatttctctgttcttgacatctgggctggtgtgaaaaaatgtagtaattcgctgaataacatcttcagtcattgtagtctgacaggcaaaattattattgctatcacagctaacaagtatacctggcgttgtctggtttatttttaggctgtaaatcacttttatattgtctttattgatatacagaaacaacagcaccatagccatacatatagccataataaaaaggataacacgaatctttttcttcagataaaataaaatctcaatcagatcgatatcctgtttgatttgttcacgcataatatatccagagaataaaatctgtcgcagataaggttgtattaatagtctgtatcaggaatgttcgggttaaatatcagcaaaaagcccgcatcatgaatactggatatgaagcatgagagttacctcagtgtttatataaggattcggtccccctctctggaacggtaactctcaatctgatcggttcctgcgttagttcacatcacgactcattttttcgctctcaccggcatcccatttgccacaaaatatcccgccgtgctcctcggcagcgcttcctgtccacgaatcatatccgctattttctcgccaatcataattgtcgtggcgttcaaattcccggtgataatctgcggcataatcgacgcatccaccacacgcaggccttctaacccgtgtacgcggccttcgccgtcaaccacggacatctcgtcgtaacccattttgcaggtaccgcacggatggaaggcggtttcggcgtggttacgcacgaactcatcgagctgttcatccgtctggcattcgacaccggggctgatttcgcggccacgatactgatccagcgcgggttgatgcatgatctcgcgggtgatgcgaattgcgtcgcggaactcctgccagtcctgctcgtgcgacatgtagttaaacagaatcgccggatgctggtgcgggtcgcgggatttaatccgcacatgcccacggcttggcgagcgcattgagccgacgtggcactggaaaccgtgctctttcactgcattcgagccgttatagttaatcgctactggcaggaaatggtactgaatattcggccacgcaaattcctcacggctgcgaataaatccacctgcttcaaagtggttgctggcaccaacgccagtgccgccaaacagccactccgcaccgattttcggctggttccaccactgcagggcagggtagagggaaaccggttctttgcactcatattgcagatacatctccagatgatcctgaagattttcgccgacgccgggtaattcatgcaccagcggaatatcaaactccgccagcagttcagcgttgccgacgccggagcgttgcaggatctgcggtgaggcaatcgcgcctgcacataacagcacttctttgttggccgttgcgcgggttgggatggtgctgtcgccttccagccattcgacgcccaccgcgcgtttgccgtcaaaaatgatgtgatcggtcatagcgtgagtacgaatggtcaggttaggacgcgatttggcctgatcgagatagccacgcgcggtgctggcgcgacggccctgcggcgtgacggtgcgatccatcggaccaaaaccttcctgctgataaccgttgagatcgtccgtgcgcgggtagcccgcctgcacgcccgcttcaatcatcgcttcaaacagcggattgacgccgggtttggaggtagtgacgctcaccgggccatcaccgccgtgatagtcgttttcacccatatcgcgagtctcggccttgcggtagtagggcaggcagtcgaggtagctccagttctccagaccgggttcttgcgcccagttatcgagatccagcgcattgccacggatgtagcacatgccgttgatcagcgacgatccacccagacctttaccgcgtccgcactccatgcggcggttattcataaacggttcaggttccgtttcataggcccagttgtagcgtttaccctgtagcgggaatgccagggcagcgggcatctgggtgcggaagtcaaagcgatagtccgggccgcccgcttcaagcagcagcacggaggtattcggatcttcagtcagacgggtagcgagaacgttgccggctgagccggcaccaataatgatgtagtcaaattgcaaataaacctcctggttagaatatggactggaatttagccatctcaacctggatggacttcacctgggtgtaactctggagcgtcatcacgccgttctcgcgaccaatgccggagtgtttgtagccgccaacgggcatctctgccggggattcgccccaggtgttgatccagcaaatacccgcttccagctgatgaatgacgcgatgcgcgcggttcaggtccgctgtcacgatgcccgccgccaggccgtagtcggtatcgttagcgcggcgaatgacttcgtcttccgactcgtaggtcagaatggacatcactggcccgaagatctcttcacgcacgatggtcatatcgtcgctgcaatcggtgaacactgtcggtgcaacccatgcgccgttatcgaagccatcgcctttcagtacatcgccgccgcacagtacgcgcgcgccttcctctttgcctttggcgatatagcgcagcacgttatcgcgatgcgggaagctgaccagcgggccgaagttagtttgcggatcgaaaacgtcgcccgcgcgaatgcgctcaacgcgcgccagaattttctgctcaaatgcggctttgcatttcgccggaacgaagacgcgggtgccattggtacacacctgaccggagctgaagaagtttgccatcatggcgatatcggcggcgagatcgagatccgcatcatcgaaaacgatcagcggtgatttaccgcccagttccatggtcacttctttcagggaagaggccgccgagttagccatcacttttttgccgctggcgacaccgccggtaaatgacactttggcaatgcccggatgctcggtcagatattgcccggtctccgcgcccacgcccggcaacacgttaaatacgccgtccggcaggcccgcttcgctgtaaatttcagccagctttaacgcggtaagcggggtaacttcgctcggtttgaaaatcattgcgttgcctgccgccagcgccggggcggatttccacagggcaatctggatcgggtagttccatgcgccaatccctgccactacgcccagcggttcgcggcgggtatacacaaaggacgtttcacgcaacgggatctggctgccttccagcgccgggatcagcccggcgtagtactccagcacgtccgcaccggtaacgatatcgacggttgaggtttccgaatatgcttttccggtgtcgagggtttccagttttgcgagttcgtcattgcgttcacgcagaatatcaacggcccgacgcagaatacgcgagcgctccatggcggtcatcgacgcccagattttttgcccctgctgggcgcttttcacggcgcgatcgacatcctcgcgcccggcggcctgcacggtcgccagcacgttaccgttggccgggttaatggtctcgaaggtgcgaccgctggtggcggaggtataaccaccatgtatataaagctgctgttctgccattcgggacatcacgtctcctcggttaatcggtgggtagatgctgagtgataaagtggcgggtcagggaattagcgcgggttttatccagcggtttgccgctcagagccgcgcgcagccataatccatcaatcagcgcggccaggccgtagcccgcttcctgtgcctgttcgcgcggcaattcgcgacgaaactcgctcaccagattcgacagcaagcggcggctgctgacctgctgtaaacgatagagcatcggctgatgcatactgctggcccagaacgccagccaggctttcatcgccgcactgctcacctgcgtttcatcgaagtttccgccaacaatcgcctgtaatcgctgctctgcactgccctgcggaagtgcatgtaatcgattcaaaaccgcgtcacgcagctgactggtgatatcgcgcatggttgcttccagcagaccatttttgtccctgaaatagtggctgatgatccccgtagaaacgcctgcacggcgggcgatctgcgcgatcgttgcatcgtgcatgcccacttcatttattgcttccagtgtggcgtcgatcagttgtctgcgccggatcgactgcatccccaatttgggcattttcgccactccattcatcagcggtgtttatctattaaagcggttattgattggacgttcaatataaaatgtgtcttaattgttacgaatttgattttaaatagtaacaataacagtggggatactggatgacagacctttcacacagcagggaaaaggacaaaatcaatccggtggtgttttacacctccgccggactgattttgttgttttccctgacaacgatcctgtttcgcgacttctcggccctgtggattggccgcacgctggactgggtttctaaaaccttcggttggtactatctgctggcggcaacgctctatattgtctttgtggtctgtatcgcttgttcgcgttttggttcggtgaagctcgggccagaacaatccaaaccggaattcagcctgctgagttgggcggcgatgctgtttgctgccgggatcggtatcgacctgatgttcttctccgtagccgaaccggtaacgcagtatatgcagccgccggaaggcgcgggacagacgattgaggccgcgcgtcaggcgatggtctggacgctgtttcactacggcttaaccggctggtcgatgtatgcgctgatgggcatggcgctcggatactttagctatcgttataatttgccgctcaccatccgctcggcgctgtacccgatcttcggtaaacggattaacgggccgataggtcactcagtggatattgcagcggtgatcggcactatcttcggtattgccactacgctcggtatcggtgtggtgcagcttaactatggcttgagcgtactgtttgatattcccgattcgatggcggcgaaagcggcactgatcgccttgtcggtgataatcgccacgatctctgtcacctccggtgtcgataagggcattcgcgtgttatcggagcttaatgtcgcgctggcgctgggattgatcctgttcgtattgtttatgggcgacacttcgttcctgcttaatgcactggtgctgaatgttggcgactatgtgaatcgctttatgggcatgacgctcaacagttttgccttcgaccgtccggttgagtggatgaataactggacgctcttcttctgggcatggtgggtggcatggtcgccgtttgtcggcttgttcctggcgcgtatctcgcgtgggcgtaccattcgccagttcgtgctgggcacgttgattattccgtttaccttcacgctgttatggctctcggtgttcggcaatagcgcgctgtatgaaatcatccacggcggcgcggcatttgccgaggaagcgatggtccatccggagcgcggcttctacagcctgctggcgcagtatccggcgtttacctttagcgcctccgtcgccaccattactggcctgctgttttatgtgacctcggcggactccggggcgctggtgctggggaatttcacctcgcagcttaaagatatcaacagcgacgcccccggctggctgcgcgtcttctggtcggtggcgattggcctgctgacgctcggcatgctgatgactaacgggatatccgcgctgcaaaacaccacggtgattatggggctgccgttcagctttgtgatcttcttcgtgatggcggggttgtataaatctctgaaggtagaagattaccgccgtgaaagtgccaaccgcgataccgcaccgcgaccgctggggcttcaggatcgcctgagctggaaaaaacgtctctcgcgcctgatgaattatccgggcacgcgttacactaaacagatgatggagacggtctgttacccggcaatggaagaagtggcgcaggagttgcggttgcgcggcgcgtacgtggagctaaaaagcctgccaccggaagagggacagcagttgggtcatctggatttgttggtgcatatgggcgaagagcaaaactttgtctatcagatttggccgcagcaatattcggtgccgggctttacctaccgcgcacgcagcggtaaatcgacctactaccggctggaaaccttcctgttagaaggcagccagggcaacgacctgatggactacagcaaagagcaggtgatcaccgatattcttgaccagtacgagcggcaccttaactttattcatctccatcgtgaagcgccgggccatagcgtgatgttcccggacgcgtgattgttattgcataaaaccgcgccatgtctgcatatggcgctgtttctcctacctcttgatacgttatatctatacggttaagcccttagtatctattgatgattaccagacaacagataataaaaaagaaaagaactattgcagcccaaaacctacatttgggctgttgcgaatgttcaataagtttagtcttatttaatgtaaatattgctgatcatttgaaatgacgcattattcatgagaaatgtgtatcgtaaatcaactgaaattaacgcaaccatttgttatttaaggtttaattatctgtgtgtgatattttattgaatgttttaaatattgtttttattggcattgctataatattggttatcatttgctgaatggattcagtcttaatgagtgggtttttaagggacaggcatagagtaatgatacgtatgcataaccaacatctttactcattatgtcattgaatgttgacgctatgtgtttatgagggagaggtattttcagttgatctggattgttaaattcatataatgcgcctttgctcatgaatggatgccagtatgtagtgggaaattataaatattgaaatagtccaactacttctttattaccaaaaatgagtatctgaattttaatattgcattcttgcgtgattatctcctgagtttgacttgtgattacctttttaaggtatttagcgtaactgtttttgagcgagcatcagaggtaaagataatcttcttgatagtgatgtgggatgttatacgtatggcatcgctgatgtttatggttaccccttatgtgtgctcaggaatcgacaggtaatcactcatactgaacagcgataaaagataaaggtgtgttcatgaattcatgtgattttcgtgtttttctgcaagagttcggtacaacggttcatttgtcattgcctggtagcgtatccgagaaagaacgactgctactcaagctgctgatgcagggaatgtctgtaacagaaatatcacagtacagaaatcgcagtgcaaagacaatttcacatcaaaagaaacagctctttgagaaactggggattcagagcgatattactttctggcgcgatattttctttcagtacaatccggagatcatatccgccacggggagtaatagtcacagatatattaatgataatcactatcaccatatcgtcacgcctgaagccatcagtctggcgttggaaaaccacgaattcaaaccgtggatccaaccggttttctgcgcgcagactggcgtactgacgggctgtgaggtgcttgtccgctgggaacatccacaaacgggaattatcccaccggatcagtttattcctctggcggagtcatccggtcttattgtcataatgacccgccaactgatgaaacagactgcggatattctgatgccggtaaaacatttgctgccggacaatttccatattggcatcaacgtctcggcgggttgttttttggcagcgggatttgaaaaagagtgtctgaacctggttaataaattaggtaacgataaaatcaagctggttctcgagctaacggaacgtaaccctattccggtaacgccagaagccagagcgatatttgacagccttcatcagcacaacattacctttgcgctggatgactttggtacgggttatgcgacctatcgttacttgcaggcgttcccggtcgattttattaagatcgataagtcatttgtgcaaatggcgagtgtcgacgaaatctccggtcatattgtggacaatattgtcgaactagcgcgtaagcctggtctgagtatcgtggcggaaggggtagaaacccaggagcaggcggatttaatgatcggtaaaggcgttcactttttgcagggctatttgtactctccgccagtaccgggtaataaatttatctctgaatgggtaatgaaagcaggtggttgatgtaaaccgctattcacagcgcatcgggaggttggcagcgattaattctcccgatgcagtaaatcctgatagatccccgttaatatgccatttggcgcaaattgttttttaatccactgcgtcacctgacccgtagcagaatgctgagtcgccagtaacatgcgcgaatcctggcgcggattatggatttgtcgggtaaccagcagggattgcgtcatcgcctcacggaccatgtaatccggcaaaaaaccaattccttcacctaaaatctggcactgacatttggtgttgaaatctggcaccagaattgactcctgcccgtgcagcaaccagcccacttttttattaatcgtatgcgcggtgtcctccaccataatattagggtagagacgcagttggctttcggcgatgggttccggcacaaaggctaacgggtgatccggggcgatagcaaaagcccagcgaatcgcgccaatttcagtgtaatcaataccgccgccgtccagtagtgtatcgggtgcgccgatggcgatattggcctgattattaataatcgcatcccagacgccgttatacacttcggtggtgacggtaatctggcaggtaggaaactgctttttcagcacctgtaacaagcgtgcggtgtgtttgggcgtataaagcagctgattaatacaaatgcgcacacgcgcttctatgccctgcgaaatagtatcgattctgcgtttgatggcataaaaatcattcagcaggtcggtagctttgcggaaaaaataacgcccggactccgttaactcaatgctgcgggtactgcgagtgaacagcaccacatccagccccgtctccatacgcttaatggtgtagctaatggcggaagtggttaaacccaactcttctgcggctttactgaagctgccaaaacgcgcagcggtagtaaatgccaacagattctcttcggtaaaaattgagttcattaaaccattctcgccattatctactatgaatttctccagctatgactgtagaggtatcggttaaagatagataatcatttttgaataacttttaatacccgtcgcgtttagtcgtcgcttcgcttaatttttgtccaccatattctgaaattacccccacgcagttacccgccagaaaacccagtaacgtcaccgtccagttcatcccgctggcaaaaaacagcgtcatgccgagaaagccaccgggaataaaggacagtaaccagaaacgcccttgccagaccactaccgccgagaagggtacggtagtaattacgctcgcccagaacgcggacagtccacttacagaggccagccaaccagcagtcagcgcggcgaaaaacgcccacaccatcccggaataattaaccgccagacttctgataaaccccgatttaccgccgcctgcggcataaaaactgcaaaaggcgacgaagccaatggttcctaataattcccatccttgagagagcccgacatgtgaagacactaactgccaaagccctgcacaaataccgacggtgacacccgttgccgtgagtccgttcatcttgttcccctctggttagacatggacgaaagctactcttacatgtgcagactatagagaaataaaacctgattgagtgaaagggtatcgggtcaaagaaacaaatattgcactaccgcacactgcgaaaagattgttgaatattattcaacaaaaaggcgagatacggcgaattaaatttaagcgggttcttttatcagattatcgttgctattctcaattcatcgaaaacagccacaaaaaccaggggaatgtgaatgagtataaaaaatctacctgccgactatttattggctgcacaacagggtgatatcgataaagtaaaaacctgccttgcgctgggtgtcgatattaatacctgcgatcgtcaggggaaaacggcaattacgctggcaagtttatatcagcaatatgcttgcgttcaggcattaattgatgccggagcggatattaataagcaagatcatacctgtttaaatccttttttaattagctgtctgaacgatgatttaacgctactacgaattattttaccggctaaacccgatcttaattgcgtaacccgttttggcggtgtcggcctgacgcctgcctgtgaaaaaggccatttaagtattgtaaaagagcttttggcgcatacggagattaacgttaaccagaccaaccatgtaggctggacgccgctactggaagcgattgtgcttaatgatggtggtattaaacagcaggcgattgtgcagttattgctggaacacggtgccagcccgcatctgaccgataaatatggcaaaacgccactggaactggcgcgggaacggggctttgaagagattgcgcagttactgattgccgcaggtgcataaaccgggaggcttgctatcaacacaccagaaagacggtgtgtgtgggcgctaactgcggatgcggattttctggcgcagcgggggcaaggacaggttgaacaggtctttgccagagcggtaaatatcgcactcccggctcgccagcagttgctgacgctgctttgtgaagagtacgacaatgcgccaaacagttgtcggttggcactcactcactttgatgatctgttccggcatggtgataaggttcagtttgacgatcaaggtattacggttggtcaacatcttcatatagagatgagtcgttgtcggcgttggctgtccccaaccttgcaaatgaccgctgtgaattttcaccttatcgcctggctacagtggcacgacattattcatcagcacctgggggaaaatgaaaccctgtttaattatcgcggcgataatccgttttatcaggcgttaaataaagaattacatattaaacgacgggcagttattcaggccgtaaacgataaacaaaatatcgcctcagcggtcgccagtatgatggggttagggattggccttacgccatcagccgacgattatttaacaggtctggcgcttattttatttattcccgggcatccggcggaaaaatacaaagaggaattttatctcggtctgcaacgcggcaaaaataataccacattattaagtgccataacgctggaagccgcattacaacaacgctgccgggaaaatattcatcgttttattcacaacattatttatgacatccctgggaacgcaactcaggcaatagaaaaaattaaacatattggctccagttccggctgcgacatgctgtatggcatggccgatggttgtgcgctgagccaaacctacggagggaattatgtcagttaaaatagtcattaaaccgaatacctattttgattctgtctcgctgatgtctatctccacgcgtgcaaataaactcgacggcgtcgagcaggcatttgtggcgatggcgaccgaaatgaataaaggcgtgctgaagaatttaggactgctgacgccggagctggagcaggcgaaaaacggcgacctgatgattgtcatcaatggtaaatcgggtgcggacaacgagcagttactggtggagattgaagaactgttcaacaccaaagcgcaaagcggctcgcacgaggcgcgttacgccactattggcagcgccaaaaagcatatcccggaaagtaacctggcggtgatttcggtcaacggtctgtttgccgctcgcgaagcgcgtcaggcgctgcaaaacgatctcaacgtgatgctgttttccgataacgtctcagttgaagatgaactggcgctcaagcaactggcccacgaaaaagggctgctgatgatggggccagactgtggcacggcgattatcaacggcgcggcgctctgttttggtaacgccgtgcgtcgcggcaacatcggtattgttggcgcatccggcaccggcagtcaggagttgagcgtccgcattcatgaatttggcggcggcgtttcgcaactgattggcaccggcgggcgcgacctgagcgagaaaatcggcggcctgatgatgctcgacgccatcgggatgctggaaaacgatccgcaaactgaaatcattgcgcttatctccaaaccgcctgcgcctgcggtggcccgcaaagtgctggaacgtgcgcgcgcctgccgcaagccggtggtcgtctgcttcctcgatcgtggcgaaacgccagtggatgagcaggggctacagtttgcccgcggcaccaaagaggcagcgctaaaagcggtgatgctctccggcgtgaaacaggaaaatctcgacctgcatacgcttaaccagccgttgattgcggatgtgcgtgcgcgtctgcaaccgcagcagaaatacattcgtggcctgttctgcggcggcacgctgtgcgacgaaaccatgttcgcggtgatggaaaaacatggcgatgtctacagcaacattcagcccgatccggaattccgcctgaaagatatcaaccgcagcatcaaacacaccttcctcgactttggcgatgacgacttcaccaatggcaagccgcacccgatgattgaccccaccaaccgcatcagtcgcttgatcgaagaggcgcgcgatccagaagtggcggtgatcgtgatggattttgtgctcggatttggatcgcatgaagatccggtcggctccaccatcgagacgatcaaagaagcgaaagcgatcgccgctgccgaaggacgcgagttgatcattctcgcctatgtgctgggtaccgatcttgatacgccatcgttagaacaacaaagccagatgctgcttgatgccggagtgattctggcgagcagcagcaccaataccggattgctggcgcgtgaatttatctgcaaaggggaggaagcctgatgagccagtcactgtttagccaaccattgaacgttattaacgtcggcatcgccatgtttagcgatgacctgaaaaagcagcatgtagaagtgactcaactcgactggacgccgccggggcagggcaatatgcaggtggtgcaggcgctggataacattgccgattcgccgctggcggacaaaatcgccgccgctaaccagcaggcgctggagcgtattatccagtcgcatccggtgctgattggttttgatcaggcgattaacgtggtgccgggcatgacggcgaaaaccattcttcacgccgggccgccgatcacctgggaaaaaatgtgcggcgcgatgaaaggcgcggtcaccggagcgctggtgttcgaaggactggcgaaagatctcgacgaggcggctgaactggcggcttccggggagatcaccttctcgccgtgtcacgagcacgactgcgtgggatcgatggcgggtgttacctcggcctcgatgtttatgcacatcgtaaaaaacaaaacctacggcaacatcgcttataccaacatgagcgagcagatggcgaagattttgcgtatgggcgctaacgaccagagcgtgattgaccgcctgaactggatgcgtgatgtgcagggaccaatactgcgcgacgcgatgaaaattatcggcgaaatcgatctgcgcttaatgctggcgcaggcgctgcatatgggcgatgagtgccataaccgcaataacgccgggacgacactgctgattcaggcgctgacgccggggattattcaggcgggttattccgtcgagcaacagcgcgaagtgtttgagtttgtcgccagcagcgactacttctccggcccgacgtggatggcgatgtgtaaagcggcgatggatgcggcgcatggcatcgaatacagcaccgtggtcaccaccatggcgcgtaacggcgtcgagttcggcctgcgggtcagcggcctgccggggcaatggtttaccggcccggcgcagcaggtgatcggcccgatgtttgccggttataagccggaagattcggggctggatatcggcgacagcgccatcaccgaaacctacggtattggcggatttgctatggcgaccgcgcccgctatcgtcgcgctggtgggcggcacggtggaagaagctattgatttctcccgtcagatgcgcgaaatcaccctcggtgaaaaccccaacgtcaccattccgctgctcggttttatgggcgtgccgtcggcaatcgacatcacccgcgtgggtagcagcggcattctgccggtgatcaacaccgccatcgcccataaagatgcgggcgtcggcatgattggcgcgggcattgtgcatccaccttttgcctgcttcgagaaagccattcttggctggtgcgaacgttacggcgtctgacctacatgttcatgccggatgcggcgtgaacgccttatccggcctacgaatggcgcaagaatctgtaggcctgataagcgtagcgcatcaggcatttgtcaccattgccggatgcggcgtgaacgccttatccggcctacgaatggcgcaagaatctgtaggcctgataagcgtagcgcatcaggcatttgccaccactgccggatgcggcgtggacgccttatccggcctacgagtggcgcgagaatctgtaggcctgataagcgtagcgcatcaggcatttgtcaccattgccggatgcggcgtgaacgccttatccggcctacgagtggcgcgagaattgtaggcctgataagcgtagcgcatcaggcagtctggcgttggtcataaccccatcaccctctgtagcggacataacaacatgaaagagcttgtggtcgttgccattggtggcaacagcattatcaaagataacgccagccagtcgattgagcatcaggcggaggcggtgaaagccgtcgccgatacggtgctggaaatgctggcttccgattacgacattgtgctgacccacggcaacgggccgcaggtcgggctggatttacgccgtgcggagattgcccacaagcgcgaagggctgcccttaacgccgctggcgaactgtgtggcagatacgcagggcggcatcggctatctgatccaacaggcgctgaataaccggctggcgcgtcacggcgagaagaaagccgtcaccgtggtgactcaggtggaagtggataaaaacgatccaggttttgcccatcccaccaagcccatcggcgcattctttagtgacagccagcgtgacgaattacaaaaggcaaaccctgactggtgttttgttgaagatgccgggcggggctatcgccgcgtggtcgcctcgccggaaccgaaacgtattgtcgaagcacctgccattaaagcgctgatccaacaaggttttgtcgtaattggcgcgggcggcggtggaattccggtagtgcgtactgacgcgggagattaccaaagcgtggacgcggttatcgacaaagatctctctaccgcgctgctggcccgtgaaattcacgccgacattcttgtgatcaccactggcgtcgaaaaagtgtgtattcactttggcaaaccgcagcagcaggcgctcgatcgggtggatattgccaccatgacccgctatatgcaggaagggcatttcccgcccggcagcatgttgccaaaaatcatcgccagcctgacatttttagaacaaggcggcaaagaagtgattatcaccacgccggaatgcctgcctgcggcgctgcgcggcgaaacgggcactcatattattaaaacgtaaggacgtaagatgaaagaaagcaatagccgccgtgaatttctgagccagagcggtaagatggtcaccgccgccgcgctgtttggtacctctgtgccgctcgcccatgcggcggtagctggcaccctaaactgcgaagcgaacaacaccatgaaaatcactgacccgcattactatctcgataacgtgctgctggaaaccggttttgactacgaaaatggcgtggcggtgcagacccgcacggcgcgccagaccgtggagattcaggacggcaaaattgtcgccctgcgcgagaacaagctgcatccggacgccacgctgccgcactatgacgctggcggtaagctgatgctgcccaccacccgcgacatgcatattcatctcgacaaaaccttttacggcgggccgtggcgctcgctcaatcgtccggcaggcaccaccatccaggacatgatcaaactcgagcagaaaatgctgccggaactgcaaccgtacactcaggagcgggcagaaaaactgattgatttattgcagtcgaaaggcaccaccattgcccgcagccactgcaatatcgaaccggtttccggcctgaaaaatctgcaaaatttgcaggcggtgctggcgcgacgtcaggcgggctttgagtgtgaaatcgtcgccttcccgcagcacggtttgctgctgtcgaaatctgaacctttaatgcgtgaagcgatgcaggcgggggcgcattacgtcggcggcctggacccgaccagtgttgatggcgcgatggaaaaatccctcgacaccatgttccagattgcgctggactacgacaaaggcgtcgatattcacctgcacgaaaccactccggcaggcgtggcagccatcaattatatggttgaaacggtagagaaaacgccacagctgaagggcaagctgaccatcagtcacgcctttgcgctggcaacgctcaacgagcaacaggtagatgaactggcgaaccggatggtggtgcaacaaatttctatcgcctcgacggtgccgattggcacgctgcatatgccgctcaaacagttgcacgacaaaggcgtaaaagtgatgactggcactgacagcgttatcgaccactggtcgccttatggtctgggcgacatgctggaaaaagccaatctgtacgcgcagctctatattcgtcctaacgaacagaacctctcccgctcgctgtttttagccactggcgatgtattgccgctgaatgaaaaaggcgagcgtgtatggccaaaagcgcaggatgacgccagctttgtgctggtggacgcctcctgttccgccgaggcggtggcgcgtatctcgccgagaaccgcaacgttccataaagggcaactggtgtgggggagtgtggcaggttgatgcgcatttgaaacgcctgcaacggtgaatagtaagagatttaagccccagggagtggggcaatctgaatatgagtgtgtcggcagaaatggacattatctttgaggaatatgcccttattgacgttgtgtagataactatttgtctacgtgaaaagatcatcagttttgccgattttagtcttttacagatagcaaatatcacacttacaggcgctcgccttatggggaacgttgctgctctgtttcattcaggctcgcggcatgttggggctggatcgggtggtttaaatattggctatattcaatggacgcgttttgccgcgatgacatatcaggcgttgccaaatacacatagctaatcaggagtaaacacaatgaagatcaaagctgttggtgcatattccgctaaacaaccacttgaaccgatggatatcacccggcgtgaaccgggaccgaatgatgtcaaaatcgaaatcgcttactgtggcgtttgccattccgatctccaccaggtccgttccgagtgggcggggacggtttacccctgcgtgccgggtcatgaaattgtggggcgtgtggtagccgttggtgatcaggtagaaaaatatgcgccgggcgatctggtcggtgtcggctgcattgtcgacagttgtaaacattgcgaagagtgtgaagacgggttggaaaactactgtgatcacatgaccggcacctataactcgccgacgccggacgaaccgggccatactctgggcggctactcacaacagatcgtcgttcatgagcgatatgttctgcgtattcgtcacccgcaagagcagctggcggcggtggctcctttgttgtgtgcagggatcaccacgtattcgccgctacgtcactggcaggccgggccgggtaaaaaagtgggcgtggtcggcatcggcggtctgggacatatggggattaagctggcccacgcgatgggggcacatgtggtggcatttaccacttctgaggcaaaacgcgaagcggcaaaagccctgggggccgatgaagttgttaactcacgcaatgccgatgagatggcggctcatctgaagagtttcgatttcattttgaatacagtagctgcgccacataatctcgacgattttaccaccttgctgaagcgtgatggcaccatgacgctggttggtgcgcctgcgacaccgcataaatcgccggaagttttcaacctgatcatgaaacgccgtgcgatagccggttctatgattggcggcattccagaaactcaggagatgctcgatttttgcgccgaacatggcatcgtggctgatatagagatgattcgggccgatcaaattaatgaagcctatgagcgaatgctgcgcggtgatgtgaaatatcgttttgttatcgataatcgcacactaacagactgaaaaaattaataaataccctgtggtttaacatattaacttcgctctccacttaactttttagttaaggagagcgaaataatatcaaagtagcagtaaaacctataacgtaaatttaaattgttaaattaacgccctccagtacacaatacttcacacgttagttatgagcgatttctgatagtgcctggtttaatcagagctttattatctgcgacgtttatttttatttaagagagatcgcgatgatatcattaaaagctccgcacaataatttgatgccatatacgcaacaaagcatacttaatacggttaaaaacaatcagttaccagaggatatcaaaagctccctggtttcctgtgtcgatatattcaaggttttgattaaacaatattatgattatccttatgattgtcgtgatgatttagtcgatgacgacaaactcattcatctcatggctgccgtacgagactgtgagtggtcagacgataacgcactcaccataaatgtgcagtttaatgatttccctggattttatgactggatggattaccctgatcacccggttaagtttgtttttcacatacttgaaaatcaaaaagggacagtttgggtatatgaccaggatgatgcgtttcttgatattaaagcaaacgtgcaggctggacgctttaccgggcttaagaaattagtgcagtttatcgattcagtgcgaacagattgcaaatgtattcttcttgaataccatatgcctttgctgagaattttccctaaagggaaagagtgtatgcatgtggaaaaatggcttcgcgaaatgtcgtctattccggagacagacgcgcccattaagcaggcgcttgcgcatggattattattacacttaaaaaatatctaccctgtttttcctgaatcactggtgatgttattgctctctgttctggacgtaaaaacatacagagatgatgcgcgattaaatgaatggatatctaatagagtgcaggaattaggtgacagatattatcctgtaaataagcacgttaaaatccgctacactctttagttcagaaagggttccacctgcaagttgttattccacctgagagtgaatcgcaatgcaggtaatcatttcatctgtatatctgtatgccaactggcattccatctcttttttcgccgatattttgttgtgatcggcgacacttcgcttaaaaaagcaccagtagtggtttcgcagccatgcggtgtataaaaaatgatctcatgcagatgttttgtgaatgtgttggttgacattcatatgaaaaaaatcataattccatcatgtttgtgtggggtcttttctgtatcttacgcatcgcactcaagcctgacagaaaatatgctgtaaggctcatatcaaaaaccgccattagctcatcaggaagagcagacgacaaccaggattgttgtatggtacggggttcgaggcctcgatggcggtccaacttttcaaaactcttctgaatcagatccccttattatcatccctgcaaagtggaacattgccattgtttggctattcaggatggggcagaccaatgaaaaaagcccacacaggggagagtgggctgaaatgggaagctaaagactcaagtaaacttatcggaaataaggaccacgcattacgggggctatcatcgccgatggccgtgattcggcaaatcaggttgattacgtagagagtaaattatctgctcaccgctgcgtcaccccttcgtaaatcaggcgtagcgcgaatacaccaataattgcaccaataacccgactggcaacgcgttgcatacgcccataagcacgacgcacagcgggcaaagaaaacgcctgactaagaaaaactcgccagataattgatgcgagcacaatccccgcccaggccattaaacgtgcccatgttggtgtttcggcatttaatgttactgagaaaatactgataaaaaataaaacggtttgcgggttagagagatcggtaattaatccgcggcgaaaaaagacataccagggggcgctaatcggttgttgtagtgtgctcatttgcggtgttgactggcggcgcatgctgcaccacgcaaaccataagagataagcgccgccgacgattctgataagcgaaaaaatctcctcacactgcgtaattagcgttgcaagaccaaacaaacccaacccggaataaaatgcatcgcccagcgccacgcccagcccggtcagcacccctgcgcgtcgaccggaagccaggctggtttgtactaccacaaagagattggctcccggattaaaaaaagtaatcacgaacagtcctacggtcaggtaaacggcatgcaaaggatccatagtgatttcatccataaataagtgaactaactgcatcatatttctaccaaaaataatcgggtgcgagagagatcacaaagtgtcttatttccggttactggcgtttatgccctgactgaactaattattaatcaacccaataatgtgggtgggtgatagtgtgataacaactctggagccgtaatatgaaaataatctctaaaatgttagtcggtgcgttagcgttagccgttaccaatgtctatgccgctgaattgatgaccaaagcggaatttgaaaaagttgaatcgcagtatgaaaaaataggtgatatttcaaccagcaatgaaatgtcgactgcagatgcaaaagaagatttgatcaaaaaagcggatgaaaaaggggctgatgtgttggtactgacctccggtcaaactgacaataagatccacggcacggcaaatatttataagaagaagtaattctgaatcctatgtaaacatctccgatgcgtaagtttatcggtgatcatctattgaaatttatgccggataaagcgttcgcgctgcattcggcagttcagcttttcagccgccgccagaacgtcgtccggctgatgcctaaataattcgccgctgctgttttatcgccattaaatttctccagtgcctgttgtggtgtcagtaagcgtggagcgggagttttcgccgactcgcgcgccagttccggcagtagcagttgcataaactgcggcgttaaatccggcgtcggttccacacttaaaaacagcgccagtcgttccatcatattgcgcagttcacgaatattgcctggccagtcgtagtgcagcagcacagtttcacttgcctgtaacccctggcgtaatgcagcagaaaatggggcggagagcgccgccagagacactttcaaaaagctttccgccagcggaagaatatccgccacccgctcgcgcagtggtggcaattgcagacgcaaaatactcagccgataaaacagatcacggcgaaaacgtccttgctgcatatcttcttccagattgcagtgagtggcgctaatgacccgtacatctaccggaacaggctgatgcccgccgacgcgggtgacctctttttcttccagcacccgcagcagccgggtctgcaaaggtagcggcatttcgccaatctcatccagaaacagcgtaccgccgtgggcaatttcgaacagcccggcgcgacctccgcgtcgcgagccggtaaacgccccttcctcatagccaaacagttctgcttccagcagcgattcggcaatcgccccgcagttgacggcaacaaacggatgcgactttttgccctgtcgcgcatcgtggcgggcaaaatattcccgatgaatcgcctgggccgccagctctttgcccgtccccgtttccccctcaatcaacaccgccgcactggagcgggcatacagcaaaatagtctgccgtacttgttccatctgtggtgattgaccgagcatatcgcccagcacgtaacgagtacgcagggcgttgcgggtggcatcgtgagtgttatggcgtaacgacatgcgcgtcatatccagcgcatcgctgaacgcctggcgcacggtggcggcggaatagataaaaattccggtcattccggcttcttctgccaaatcggtaatcagccctgcgccgaccaccgcttcggtgccgttagcttttagctcgttaatctgcccgcgtgcgtcttcctcggtaatgtagctacgttggtcgaggcgcaaattaaaggttttttgaaacgccaccagcgctggaatggtttcctgataggtgacaacgccgatagaagaggtgagttttccggcttttgccagtgcctgtaacacatcgtagccgctcggtttaatcaaaataactggcactgacaggcggcttttcaggtacgcgccgttagagccagccgcgatgatggcgtcacagcgttcgtttgccagtttcttgcggatgtaggtcactgctttttcaaagccaagctgaataggggtaatgttcgccaggtgatcaaactcgaggctgatatcgcgaaacagctcgaacaggcgcgttacagataccgtccagataaccggtttgtcgtcattaagccgtggtggatgtgccatagcgcaccgcaaagttaagaaaccgaatattgggtttagtcttgtttcataattgttgcaatgaaacgcggtgaaacattgcctgaaacgttaactgaaacgcatatttgcggattagttcatgactttatctctaacaaattgaaattaaacatttaattttattaaggcaattgtggcacaccccttgctttgtctttatcaacgcaaataacaagttgataacaaaggatgggctatgtctctacactctccaggtaaagcgtttcgcgctgcactgactaaagaaaatccattgcagattgttggcaccatcaacgctaatcatgcgctgttggcgcagcgtgccggatatcaggcaatttatctttctggcggtggcgtggcggcaggttcgctggggctgcccgatctcggtatttctacccttgatgatgtgctgaccgacattcgccgtatcaccgacgtttgttcgctgccgctgctggtggatgcggatatcggttttggttcttcggcctttaacgtggcgcgcaccgtgaaatcgatgattaaagccggtgcggcaggattgcatattgaagatcaggttggtgcgaaacgctgcggtcatcgtccgaataaagcgatcgtctcgaaagaagagatggtggatcggatccgcgcggcggtggatgcgaaaaccgatcctgattttgtgatcatggcgcgcaccgatgctctggcggtagaggggctggatgcggcgatcgagcgtgcgcaggcctatgttgaagcgggtgccgagatgttgttcccggaggcgattaccgaactcgccatgtaccgccagtttgccgatgcggtgcaggtgccgatcctcgccaacatcaccgaatttggtgccacgccgctgtttaccaccgacgaattacgcagcgcccatgtcgcaatggcgctgtacccactttcagcgttccgcgccatgaaccgcgccgctgaacatgtctacaacgtcctgcgccaggaaggcacgcagaaaagcgtcatcgacaccatgcagacccgcaacgagctgtacgaaagcatcaactactaccagtacgaagagaagctcgacaacctgtttgcccgtagccaggtgaaataaaaaacgcccgttgattgtattcgacagccgatgcctgatgcgtcgctgacgcgacttatcaggcctacgaggtgcactgaactgtaggtcggataagacggatggcgtcgcatccgacaaccgatgcctgatgcgccgctgacgtgacttatcaggcctacggggtgcactgaactgtaggtcggataagacgcatagcgtcgcatccgacaaccgatgcctgatgcgccgctgacgcgacttatcaggcctacggggtgcactgaactgtaggtcggataagacgcatagcgtcgcatccgacaaccgatgcctgatgcgccgctgacgcgacttatcaggcctacggggtgaactgaactgtaggtcggataagacgcatagcgtcgcatccgacaacaatctcgaccctacaaatgataacaatgacgaggacaacatgagcgacacaacgatcctgcaaaacagtacccatgtcattaaaccgaaaaaatctgtggcactttctggcgttccggcgggcaatacggcgctctgcaccgtgggtaaaagtggcaatgacctgcattaccgcggctacgatattcttgatctggcgaaacattgcgaatttgaagaagtggcgcatctgctgatccacggcaaactgccgacccgtgacgaactcgccgcttacaaaacgaaactgaaagccctgcgcggtttaccggctaacgtgcgtaccgtgctggaagccttaccggcggcgtcgcacccgatggatgttatgcgcaccggtgtttccgcgctcggctgcacgctgccagaaaaagaggggcataccgtctctggcgcgcgggatattgccgacaaactgctggcgtcgcttagctcgattctcctttattggtatcactacagccacaacggcgaacgcatccaaccggaaaccgatgacgactccatcggcggtcacttcctgcatctgctgcacggcgaaaagccatcgcaaagctgggaaaaggcgatgcatatctcgctggtgctgtacgccgaacacgagtttaacgcctccacctttaccagtcgggtgattgcgggcaccggctctgatatgtattccgcgattattggcgcgattggcgcactgcgcgggccaaaacacggcggggcgaatgaagtgtcgctggagatccagcaacgctacgaaacgccggacgaagccgaagcagatatccgcaagcgcgtggaaaacaaagaagtggtcattggttttggtcatccggtttacaccatcgctgacccgcgccaccaggtgattaaacgtgtggcgaagcagctctcgcaggaaggcggctcgctgaagatgtacaacatcgccgatcgcctggaaacggtgatgtgggagagcaaaaagatgttccccaatctcgactggttctctgctgtttcctacaacatgatgggcgttcccaccgagatgttcacaccactgtttgttatcgcccgcgtcaccggctgggcggcgcacattatcgaacaacgtcaggacaacaaaattatccgtccttccgccaattatgttggaccggaagaccgcccgtttgtcgcgctggataagcgccagtaaacctctacgaataacaataaggaaacgtacccaatgtcagctcaaatcaacaacatccgcccggaatttgatcgtgaaatcgttgatatcgtcgattacgtcatgaactacgaaatcagctctaaagtggcctacgacaccgcacattactgcctgctcgacacgctcggctgcggtctggaagctctcgaatacccggcctgtaaaaaactgctggggccaattgttcccggcaccgtcgtacccaacggcgtgcgcgtccccggaactcagttccagctcgaccccgtccaggcggcatttaacatcggcgcgatgatccgctggctcgatttcaacgatacctggctggcggcggagtggggccatccttccgacaacctcggcggcattctggcaacggcggactggctttcgcgcaacgcggtcgccagcggcaaagcgccgttgaccatgaaacaggtgctgaccgcaatgatcaaagcccatgaaattcagggctgcatcgcgctggaaaactcctttaaccgcgtcggcctcgaccacgttctgttagtgaaagtggcttccaccgccgtggtcgccgaaatgctcggcctgacccgcgaggaaattctcaacgccgtttcgctggcgtgggtggacggtcagtcgctgcgcacctatcgccatgcgccgaacaccggcacgcgtaaatcctgggcggcgggcgatgccacttcccgcgcggtacgtctggcactgatggcgaaaacgggcgaaatgggttacccgtcagccctgactgcgccggtgtggggcttctacgacgtctcctttaaaggtgaatcgttccgcttccagcgcccgtacggttcctacgttatggaaaatgtgctgttcaaaatctccttcccggcggagttccactcccagacggcagttgaagcagcgatgacgctctatgaacagatgcaggcagcaggcaaaacggcggcggatatcgaaaaagtgaccattcgcacccacgaagcctgtattcgcatcatcgacaaaaaagggccgctcaataacccggcagaccgcgatcactgcattcagtacatggtggcgatcccgctgctattcgggcgcttaacggcggcagattacgaggacaacgttgcgcaagataaacgcattgacgccctgcgcgagaagatcaattgctttgaagatccggcatttaccgctgactaccacgacccggaaaaacgcgccatcgccaatgccattacccttgagttcaccgacggcacacgatttgaagaagtggtggtggagtaccccattggtcatgctcgccgccgtcaggatggtattccgaaactggtcgataaattcaaaatcaatctcgcgcgccagttcccgactcgccaacagcagcgcattctggaggtttctctcgacagagctcgcctggaacagatgccggtcaatgagtatctcgacctgtacgtcatttaagtaaacggcggtaaggcgtaagttcaacaggagagcattatgtcttttagcgaattttatcagcgttcgattaacgaaccggagcagttctgggccgagcaggcccggcgtattgactggcagacgccctttacgcaaacgctcgatcacagcaatccgccgtttgcccgttggttttgtgaaggccgaaccaacttgtgccacaacgccatcgaccgctggctggagaaacagccagaggcgctggcgctgattgccgtctcttcggaaacagaagaagagcgcacctttacctttcgtcagctgcatgacgaagtgaacgcggtggcctcaatgttgcgttcattgggtgtgcagcgcggcgatcgggtgctggtgtatatgccgatgattgccgaagcgcatattactctgctggcctgcgcgcgcattggcgctattcactcggtggtgtttggtggatttgcctcgcacagcgtggcggcgcgaattgatgacgctaaaccggtgctgattgtctcggctgatgccggagcgcgcggtggcaaaatcattccctataaaaaattgctcgacgatgcgataagtcaggcgcagcaccagccacgccatgttttgctggtggatcgcgggctggcgaaaatggcgcgcgtcagcgggcgggatgtcgatttcgcgtcgttgcgccatcaacacatcggcgcgcgggtaccggtggcgtggctggaatccaacgaaacctcctgcattctctacacttccggcacgaccggcaaacctaaaggcgtgcagcgtgacgtcggcggatatgcggtggcgctggcgacctcgatggacaccatttttggcggcaaagcgggcagcgtgttcttttgcgcatcggatatcggctgggtggtggggcattcgtatatcgtttacgcgccgctgctggcggggatggcgactatcgtttacgaaggattgccgacctggccggactgcggcgtgtggtggacaatcgtcgagaaatatcaggttagccggatgttctcagcgccgaccgccattcgcgtgctgaaaaaattccctaccgctgaaattcgcaaacacgatctctcgtcgctggaagtgctctatctggctggagaaccgctggacgagccgaccgccagttgggtgagcaatacgctggatgtgccggtcatcgacaactactggcagaccgaatccggctggccgattatggcgattgctcgcggtctggacgacaggccgacgcgtctgggaagccccggtgtgccgatgtatggctataacgtgcagttgcttaatgaagtcaccggcgaaccgtgtggcgtcaacgagaaagggatgctggtggtggaagggccgctgccgccggggtgtattcagaccatctggggcgacgacggccgctttgtgaagacttactggtcgctgttttcccgcccggtgtacgccacctttgactggggcatccgtgacgctgacggttatcactttattctcgggcgcactgacgatgtaattaacgttgccgggcatcggctggggacgcgcgagattgaagagagtatctccagccatccgggcgttgccgaagtggcggtggttggggtgaaagatgcgctgaaagggcaggtggcggtggcgtttgtcattccgaaagagagcgacagtctggaagatcgtgatgtggcgcactcgcaagagaaggcgattatggcgctggtggacagccagattggcaactttggccgcccggcgcacgtctggtttgtctcgcaattgccaaaaacgcgatccggaaaaatgctgcgccgcacgatccaggcgatttgcgaaggacgcgatcctggagatctgacgaccattgatgatcctgcgtcgttggatcagatccgccaggcgatggaagagtaggttattgtcggatgcgtcgcgcggtgcatccggcactgtgtgccgatgcctgatgcgacgctgacgcgttttatcatgcctacggacctgaaccgtaggtcggataaggcgctcgcgtcgcatccgacaccatgctcagatgcctgatgcgacgctgacgcgtcttatcaggcctacccactgtttttacaccgataatttttcccccacctttttgcactcattcatataaaaaatatatttccccacgaaaacgattgctttttatcttcagatgaatagaatgcggcggattttttgggtttcaaacagcaaaaagggggaatttcgtgtcgcaagataacaactttagccaggggccagtcccgcagtcggcgcggaaaggggtattggcattgacgttcgtcatgctgggattaaccttcttttccgccagtatgtggaccggcggcactctcggaaccggtcttagctatcatgatttcttcctcgcagttctcatcggtaatcttctcctcggtatttacacttcatttctcggttacattggcgcaaaaaccggcctgaccactcatcttcttgctcgcttctcgtttggtgttaaaggctcatggctgccttcactgctactgggcggaactcaggttggctggtttggcgtcggtgtggcgatgtttgccattccggtgggtaaggcaaccgggctggatattaatttgctgattgccgtttccggtttactgatgaccgtcaccgtcttttttggcatttcggcgctgacggttctttcggtgattgcggttccggctatcgcctgcctgggcggttattccgtgtggctggctgttaacggcatgggcggcctggacgcattaaaagcggtcgttcccgcacaaccgttagatttcaatgtcgcgctggcgctggttgtggggtcatttatcagtgcgggtacgctcaccgctgactttgtccggtttggtcgcaatgccaaactggcggtgctggtggcgatggtggcctttttcctcggcaactcgttgatgtttattttcggtgcagcgggcgctgcggcactgggcatggcggatatctctgatgtgatgattgctcagggcctgctgctgcctgcgattgtggtgctggggctgaatatctggaccaccaacgataacgcactctatgcgtcgggtttaggtttcgccaacattaccgggatgtcgagcaaaaccctttcggtaatcaacggtattatcggtacggtctgcgcattatggctgtataacaattttgtcggctggttgaccttcctttcggcagctattcctccagtgggtggcgtgatcatcgccgactatctgatgaaccgtcgccgctatgagcactttgcgaccacgcgtatgatgagtgtcaattgggtggcgattctggcggtcgccttggggattgctgcaggccactggttaccgggaattgttccggtcaacgcggtattaggtggcgcgctgagctatctgatccttaacccgattttgaatcgtaaaacgacagcagcaatgacgcatgtggaggctaacagtgtcgaataacgctttacaaacaattattaacgcccggttaccaggcgaagaggggctgtggcagattcatctgcaggacggaaaaatcagcgccattgatgcgcaatccggcgtgatgcccataactgaaaacagcctggatgccgaacaaggtttagttataccgccgtttgtggagccacatattcacctggacaccacgcaaaccgccggacaaccgaactggaatcagtccggcacgctgtttgaaggcattgaacgctgggccgagcgcaaagcgttattaacccatgacgatgtgaaacaacgcgcatggcaaacgctgaaatggcagattgccaacggcattcagcatgtgcgtacccatgtcgatgtttcggatgcaacgctaactgcgctgaaagcaatgctggaagtgaagcaggaagtcgcgccgtggattgatctgcaaatcgtcgccttccctcaggaagggattttgtcgtatcccaacggtgaagcgttgctggaagaggcgttacgcttaggggcagatgtagtgggggcgattccgcattttgaatttacccgtgaatacggcgtggagtcgctgcataaaaccttcgccctggcgcaaaaatacgaccgtctcatcgacgttcactgtgatgagatcgatgacgagcagtcgcgctttgtcgaaaccgttgctgccctggcgcaccatgaaggcatgggcgcgcgagtcaccgccagccacaccacggcaatgcactcctataacggggcgtatacctcacgcctgttccgcttgctgaaaatgtccggtattaactttgtcgccaacccgctggtcaatattcatctgcaaggacgtttcgatacgtatccaaaacgtcgcggcatcacgcgcgttaaagagatgctggagtccggcattaacgtctgctttggtcacgatgatgtcttcgatccgtggtatccgctgggaacggcgaatatgctgcaagtgctgcatatggggctgcatgtttgccagttgatgggctacgggcagattaacgatggcctgaatttaatcacccaccacagcgcaaggacgttgaatttgcaggattacggcattgccgccggaaacagcgccaacctgattatcctgccggctgaaaatgggtttgatgcgctgcgccgtcaggttccggtacgttattcggtacgtggcggcaaggtgattgccagcacacaaccggcacaaaccaccgtatatctggagcagccagaagccatcgattacaaacgttgaacgactgggttacagcgagcttagtttatgccggatgcggcgtgaacgccttatccggcctacgtagagcactgaactcgtaggcctgataagcgtagcgcatcaggcaattccagccgctgatctgtgtcagcggctaccgtgattcattcccgccaacaaccgcgcattcctccaacgccatgtgcaaaaatgccttcgcagcggctgtctgccagctgtagtttatgccggatgcggcgtgaacgccttatccggcctacgtagagcactgaactcgtaggcctgataagcgtagcgcatcaggcaattccagccgcagacctgtgtcagcggctaccgtgattcatttccgccaacaaccgcgcatttatccaacgccatgtgcaaaaatgccttcgcggcggctgtctgccagctatttttccgccgcaacaaaaccgccgttctctccagtagtggcggggcaagagaaatagctttaagcccgtcatgttgtgtggcaatcgctgctggtaacaatgtggaaagggaagtgcggcgaatcagctccagaaccgcgctaattgagttcgcctcaatgaccacctgtggatgtagccccgctttctcgcagtagtggtcaatttgctctctggtggcaaattccgcgctgagcaggaccagtttttcatcatgcaagcgactcaacgccacctgttcatggacggccagcggatgatgttgcgccacgactaacgctaaactttctgtcagtaaaggaattgcctccagctccggcgaatgcacaggcgcgaaggcaatcccaacgtccaactcgtcgcggcaaagcatatcctcgattttctcctgcgacatttcctgtagctggagcgtgatgctgggatagcgcgcatagaaatccgccattaaggggccgataaagtagctcgtaaaggtgggggtgacggcgatacgcagcgatcctcgcgtcagatcggcaacatcatgaatcgcccgtttacccgcccccagttcctgtaacgcccggctggcgtactgtcgccagacttctcctgcatcagtgagacgaatcgttcgcccgctacggtcaaacagcggcacgcctaaactctcctctaactggcgaatctgctgggaaagcgcaggttgggagacgtgcaacgcactggcggcacgggtgaagctgccatgttcagccacggcaagaaaataattgatatgtcgagagagcattcgcaacctataagtaaatccaatggaactcatcataaatgagacttttaccttatgacaatcggcgagtagtctgcctctcattccagagacagacagaggttaacggtgaaagagattattgatggattccttaaattccagcgcgaggcatttccgaagcgggaagccttgtttaaacagctggcgacacagcaaagcccgcgcacactttttatctcctgctccgacagccgtctggtccctgagctggtgacgcaacgtgagcctggcgatctgttcgttattcgcaacgcgggcaatatcgtcccttcctacgggccggaacccggtggcgtttctgcttcggtggagtatgccgtcgctgcgcttcgggtatctgacattgtgatttgtggtcattccaactgtggcgcgatgaccgccattgccagctgtcagtgcatggaccatatgcctgccgtctcccactggctgcgttatgccgattcagcccgcgtcgttaatgaggcgcgcccgcattccgatttaccgtcaaaagctgcggcgatggtacgtgaaaacgtcattgctcagttggctaatttgcaaactcatccatcggtgcgcctggcgctcgaagaggggcggatcgccctgcacggctgggtctacgacattgaaagcggcagcatcgcagcttttgacggcgcaacccgccagtttgtgccactggccgctaatcctcgcgtttgtgccataccgctacgccaaccgaccgcagcgtaaccttatttttaaaccatcaggagttccaccatgattcagtcacaaattaaccgcaatattcgtcttgatcttgccgatgccattttgctcagcaaagctaaaaaagatctctcatttgccgagattgccgacggcaccggtctggcagaagcctttgtaaccgcggctttgctgggtcagcaggcgcttcctgccgacgccgcccgcctggtcggggcgaagctggatctcgacgaagactccattctactgttgcagatgattccactgcgtggctgcattgatgaccgtattccaactgacccaacgatgtatcgtttctatgaaatgttgcaggtgtacggtacaaccctgaaagcgttggttcatgagaaatttggcgatggcattattagcgcgattaacttcaaactcgacgttaagaaagtggcggacccggaaggtggcgaacgtgcggtcatcaccttagatggtaaatatctgccgaccaaaccgttctgacagccatgcgcaaccatcaaaagacgttcacgatgctgctggtactggtgctgattggtcttaatatgcgaccactgctcacctccgtcgggccactgctaccgcaattgcgccaggcgagcggaatgagctttagcgtggctgccctgttgaccgctctgccggtggttaccatgggcgggctggcgctggccggaagctggcttcatcagcatgtcagcgaacgtcgcagtgtcgccatcagtctgttgctgattgccgtcggtgcattgatgcgtgagctttacccgcaaagtgcgctgctgcttagcagcgcactgcttggtggggtggggatcggcatcattcaggcggtgatgccttcggtgattaaacggcggtttcagcagcgcacgccactggtgatggggctgtggtccgcggctctgatgggcggcggtgggcttggtgccgccataacgccctggttagttcaacatagcgaaacctggtatcaaacactcgcctggtgggcgctgcctgccgttgttgcgctctttgcctggtggtggcaaagcgcccgcgaggtcgcctcttcccacaagacaacaaccactccggttcgcgtggtattcactccccgcgcgtggacgctgggtgtttacttcggtctgattaacggcggttacgccagcctgattgcctggttacccgctttctatattgagattggtgccagcgcgcagtacagcggttccttactggcattgatgacgcttgggcaagccgcaggagctttgctgatgcctgctatggctcgccatcaggatcggcgcaaactgttaatgctggcgctggtgttacaactggtggggttctgcggctttatctggctgccgatgcaattgccggtattgtgggcgatggtgtgtgggttaggtctgggcggcgcgtttccgctctgtttgctgctggcgctcgatcactctgtgcaaccggctattgctggcaagctggtggcgtttatgcagggaatcggttttatcatcgccgggcttgccccgtggttttctggcgtgctgcgtagtatcagcggcaattacctgatggactgggcatttcatgcgctgtgcgtcgttgggctgatgatcataaccctgcgttttgcaccagtacgttttccgcagctgtgggtcaaagaggcatgatgcgacgcttgttcctgcgctttgttcatgccggatgcggctaatgtagatcgctgaacttgtaggcctgataagcgcagcgtatcaggcaatttttataatttaaactgacgattcaactttataatctttgaaataatagtgcttatcccggtcgtttatttcgcgaataacccgacaaggaacgccagccgccacgacgtttggtggaatgtcttttgtgacgatactacccgcgccaataacagaattatccccgatggtgacgcctggattaataaccacatgacttccgatccagacgttattgccaatcgttatcggaaaagagtacatctcgccgttttttctcaattcatggtgtacagggtgtcccgtaacggaaagagtaacgttgggtgcaatcagtacgttatcaccgattgttaccgtgtagtcatcgacaatggttaaattgaaatttgcataaaaattgcggcctatatggatgttggaaccgtaagagaaatagacaggcggttctacccaggcgttttcccctaccgtggcaaacatttctttaatcaggctttctcttttttcaacttctgatggatgcgagtgattaaactcatacattaacgttttcccacgaagtcttttttccggtaagccttcgcacatatcggtaaatagcttgcctgctcttattctttcggtcattggcatgttcaatgcgatcactccgttatgatatgttggtcggataaggcgctcgcgccgcatccgacattgattgcttaagcgacttcattcacctgacgacgcagcagggaaagcgggccggggccgctaagcgtgaacacggaaattaaggtgaagcccagcgccaccagacccagcaccagataagcgccctggaaaccgatgctttcatacatattgcccgccagtacagacataaaaatcatcgccagttgcttaaagaagcagaaacagaccagataaatcgtcgctgaaaaacgcacttcaaactggctggtaatatatttaaagcagcccaccagcaggaacggtacttcaaacatatgcagcgttttcagaataaccacttccagcgctgaggtggcgaacgatgagccaataatacgtacagacataatagtgccagccagcagcagggcgtttttcccaccgatgcgattaatgatcagtggcgcaaagaacataatcgaggcgttaagtaattcgcccattgtcgttacgtagccaaatacccgcgtaccctgttcaccggtagcaaagaacgaagtaaagaaattagcaaactgttggtcaaaaacatcgtaggtgcaggaaacgccaataacatacagtgacaaaaaccacagttttggctgtctgaacagttccagtgccagcttaaggctaaatgccgaatggttggcacctaccgcattggcaaccgtggcagaagagggcgcatccgttttggcgaaaaagagtaaaacggcgaggatgagtgcacagccagagcccagccagaaaacaaactgattattgatggtgaacatgatgccgacaatcgaggcacacagcgcccagccaacacagccaaacatccgcgcgcgaccaaattcgaaattactgcgacggctgactttctcaataaatgcctctactgctggcgcaccggcgttaaaacaaaagcctagataaataccaccaacaatcgatcctactaaaatgttgtattgtaacagtggcccgaagataaaaataaagaacggcgcaaacatcactaacatgccggtaataatccacagcaggtatttgcgcagcccgagtttgtcagaaagcagaccaaacagcggttggaataatagcgagaacagagaaatagcggcaaaaataatacccgtatcacttttgctgatatggttgatgtcatgtagccaaatcgggaaaaacgggaagtaggctcccatgataaaaaagtaaaagaaaaagaataaaccgaacatccaaaagtttgtgttttttaaatagtacataatggatttccttacgcgaaatacgggcagacatggcctgcccggttattattatttttgacaccagaccaactggtaatggtagcgaccggcgctcagctggaattccgccgatactgacgggctccaggagtcgtcgccaccaatccccatatggaaaccgtcgatattcagccatgtgccttcttccgcgtgcagcagatggcgatggctggtttccatcagttgctgttgactgtagcggctgatgttgaactggaagtcgccgcgccactggtgtgggccataattcaattcgcgcgtcccgcagcgcagaccgttttcgctcgggaagacgtacggggtatacatgtctgacaatggcagatcccagcggtcaaaacaggcggcagtaaggcggtcgggatagttttcttgcggccctaatccgagccagtttacccgctctgctacctgcgccagctggcagttcaggccaatccgcgccggatgcggtgtatcgctcgccacttcaacatcaacggtaatcgccatttgaccactaccatcaatccggtaggttttccggctgataaataaggttttcccctgatgctgccacgcgtgagcggtcgtaatcagcaccgcatcagcaagtgtatctgccgtgcactgcaacaacgctgcttcggcctggtaatggcccgccgccttccagcgttcgacccaggcgttagggtcaatgcgggtcgcttcacttacgccaatgtcgttatccagcggtgcacgggtgaactgatcgcgcagcggcgtcagcagttgttttttatcgccaatccacatctgtgaaagaaagcctgactggcggttaaattgccaacgcttattacccagctcgatgcaaaaatccatttcgctggtggtcagatgcgggatggcgtgggacgcggcggggagcgtcacactgaggttttccgccagacgccactgctgccaggcgctgatgtgcccggcttctgaccatgcggtcgcgttcggttgcactacgcgtactgtgagccagagttgcccggcgctctccggctgcggtagttcaggcagttcaatcaactgtttaccttgtggagcgacatccagaggcacttcaccgcttgccagcggcttaccatccagcgccaccatccagtgcaggagctcgttatcgctatgacggaacaggtattcgctggtcacttcgatggtttgcccggataaacggaactggaaaaactgctgctggtgttttgcttccgtcagcgctggatgcggcgtgcggtcggcaaagaccagaccgttcatacagaactggcgatcgttcggcgtatcgccaaaatcaccgccgtaagccgaccacgggttgccgttttcatcatatttaatcagcgactgatccacccagtcccagacgaagccgccctgtaaacggggatactgacgaaacgcctgccagtatttagcgaaaccgccaagactgttacccatcgcgtgggcgtattcgcaaaggatcagcgggcgcgtctctccaggtagcgaaagccattttttgatggaccatttcggcacagccgggaagggctggtcttcatccacgcgcgcgtacatcgggcaaataatatcggtggccgtggtgtcggctccgccgccttcatactgcaccgggcgggaaggatcgacagatttgatccagcgatacagcgcgtcgtgattagcgccgtggcctgattcattccccagcgaccagatgatcacactcgggtgattacgatcgcgctgcaccattcgcgttacgcgttcgctcatcgccggtagccagcgcggatcatcggtcagacgattcattggcaccatgccgtgggtttcaatattggcttcatccaccacatacaggccgtagcggtcgcacagcgtgtaccacagcggatggttcggataatgcgaacagcgcacggcgttaaagttgttctgcttcatcagcaggatatcctgcaccatcgtctgctcatccatgacctgaccatgcagaggatgatgctcgtgacggttaacgcctcgaatcagcaacggcttgccgttcagcagcagcagaccattttcaatccgcacctcgcggaaaccgacatcgcaggcttctgcttcaatcagcgtgccgtcggcggtgtgcagttcaaccaccgcacgatagagattcgggatttcggcgctccacagtttcgggttttcgacgttcagacgtagtgtgacgcgatcggcataaccaccacgctcatcgataatttcaccgccgaaaggcgcggtgccgctggcgacctgcgtttcaccctgccataaagaaactgttacccgtaggtagtcacgcaactcgccgcacatctgaacttcagcctccagtacagcgcggctgaaatcatcattaaagcgagtggcaacatggaaatcgctgatttgtgtagtcggtttatgcagcaacgagacgtcacggaaaatgccgctcatccgccacatatcctgatcttccagataactgccgtcactccagcgcagcaccatcaccgcgaggcggttttctccggcgcgtaaaaatgcgctcaggtcaaattcagacggcaaacgactgtcctggccgtaaccgacccagcgcccgttgcaccacagatgaaacgccgagttaacgccatcaaaaataattcgcgtctggccttcctgtagccagctttcatcaacattaaatgtgagcgagtaacaacccgtcggattctccgtgggaacaaacggcggattgaccgtaatgggataggtcacgttggtgtagatgggcgcatcgtaaccgtgcatctgccagtttgaggggacgacgacagtatcggcctcaggaagatcgcactccagccagctttccggcaccgcttctggtgccggaaaccaggcaaagcgccattcgccattcaggctgcgcaactgttgggaagggcgatcggtgcgggcctcttcgctattacgccagctggcgaaagggggatgtgctgcaaggcgattaagttgggtaacgccagggttttcccagtcacgacgttgtaaaacgacggccagtgaatccgtaatcatggtcatagctgtttcctgtgtgaaattgttatccgctcacaattccacacaacatacgagccggaagcataaagtgtaaagcctggggtgcctaatgagtgagctaactcacattaattgcgttgcgctcactgcccgctttccagtcgggaaacctgtcgtgccagctgcattaatgaatcggccaacgcgcggggagaggcggtttgcgtattgggcgccagggtggtttttcttttcaccagtgagacgggcaacagctgattgcccttcaccgcctggccctgagagagttgcagcaagcggtccacgctggtttgccccagcaggcgaaaatcctgtttgatggtggttaacggcgggatataacatgagctgtcttcggtatcgtcgtatcccactaccgagatatccgcaccaacgcgcagcccggactcggtaatggcgcgcattgcgcccagcgccatctgatcgttggcaaccagcatcgcagtgggaacgatgccctcattcagcatttgcatggtttgttgaaaaccggacatggcactccagtcgccttcccgttccgctatcggctgaatttgattgcgagtgagatatttatgccagccagccagacgcagacgcgccgagacagaacttaatgggcccgctaacagcgcgatttgctggtgacccaatgcgaccagatgctccacgcccagtcgcgtaccgtcttcatgggagaaaataatactgttgatgggtgtctggtcagagacatcaagaaataacgccggaacattagtgcaggcagcttccacagcaatggcatcctggtcatccagcggatagttaatgatcagcccactgacgcgttgcgcgagaagattgtgcaccgccgctttacaggcttcgacgccgcttcgttctaccatcgacaccaccacgctggcacccagttgatcggcgcgagatttaatcgccgcgacaatttgcgacggcgcgtgcagggccagactggaggtggcaacgccaatcagcaacgactgtttgcccgccagttgttgtgccacgcggttgggaatgtaattcagctccgccatcgccgcttccactttttcccgcgttttcgcagaaacgtggctggcctggttcaccacgcgggaaacggtctgataagagacaccggcatactctgcgacatcgtataacgttactggtttcacattcaccaccctgaattgactctcttccgggcgctatcatgccataccgcgaaaggttttgcgccattcgatggtgtcaacgtaaatgcatgccgcttcgccttccggccaccagaatagcctgcgattcaaccccttcttcgatctgttttgctacccgttgtagcgccggaagatgcttttccgctgcctgttcaatggtcattgcgctcgccatatacaccagattcagacagccaatcacccgttgttcactgcgcagcggtacggcgatagaggcgatcttctcctcctgatcccagccgcggtagttctgtccgtaaccctctttgcgcgcgcgcgccagaatggcttccagctttaacggttcccgtgccagttgatagtcatcaccggggcgggaggctaacatttcgattaattccttgcggtcttgttccgggcaaaaggccagccaggtcaggcccgaggcggttttcagaagcggcaaacgtcgcccgaccattgcccggtgaaaggataagcggctgaaacggtgagtggtttcgcgtaccaccattgcatcaacatccagcgtggacacatctgtcggccataccacttcgcgcaacagatcgcccagcagtggggccgccagtgcagaaatccactgttcgtcacgaaatccttcgcttaattgccgcactttgatggtcagtcgaaaactatcatcggaggggctacggcggacatatccctcttcctgcagcgtctccagcagtcgccgcacagtggtgcgatgcaggccgctgagttccgccagcagcccgacgctggcaccgccatcaagtttatttaacatatttaataacattagaccgcgggttaagccgcgcacggttttgtattccgtctgctcattgttctgcatattaattgacatttctatagttaaaacaacgtggtgcacctggtgcacattcgggcatgttttgattgtagccgaaaacacccttcctatactgagcgcacaataaaaaatcatttacatgtttttaacaaaataagttgcgctgtactgtgcgcgcaacgacattttgtccgagtcgtgaggtactgaaatggcaatacaacaccctgacatccagcctgctgttaaccatagcgttcaggtggcgatcgctggtgccggcccggttgggctgatgatggcgaactatctcggccagatgggcattgacgtgctggtggtggagaaactcgataagttgatcgactacccgcgtgcgattggtattgatgacgaggcgctgcgcaccatgcagtcggtcggcctggtcgatgatgttctgccgcacactacgccgtggcacgcgatgcgttttctcaccccgaaaggccgctgttttgctgatattcagccaatgaccgatgaatttggctggccgcgccgtaacgcctttattcagccgcaggtcgatgcggtgatgctggaaggggtgtcgcgttttccgaatgtgcgctgcttgttttcccgcgagctggaggccttcagtcagcaagatgacgaagtgaccttgcacctgaaaacggcagaagggcagcgggaaatagtcaaagcccagtggctggtagcctgtgacggtggagcaagttttgtccgtcgcactctgaatgtgccgtttgaaggtaaaactgcgccaaatcagtggattgtggtagatatcgccaacgatccgttaagtacgccgcatatctatttgtgttgcgatccggtgcgcccgtatgtttctgccgcgctgcctcatgcggtacgtcgctttgaatttatggtgatgccgggagaaaccgaagagcagctgcgtgagccgcaaaatatgcgcaagctgttaagcaaagtgctgcctaatccggacaatgttgaattgattcgccagcgtgtctacacccacaacgcgcgactggcgcaacgtttccgtattgatcgcgtactgctggcgggcgatgccgcgcacatcatgccggtatggcaggggcagggctataacagtggtatgcgcgacgcctttaacctcgcatggaaactggcgttggttatccaggggaaagcccgcgatgcgctgctcgatacctatcaacaagaacgtcgcgatcacgccaaagcgatgattgacctgtccgtgacggcgggcaacgtgctggctccgccgaaacgctggcagggtacgttacgtgacggcgtttcctggctgttgaattatctgccgccagtaaaacgctacttcctcgaaatgcgcttcaagccgatgccgcaatattacggcggtgcgctgatgcgtgagggcgaagcgaagcactctccggtcggcaagatgtttattcagccgaaagtcacgctggaaaacggcgacgtgacgctgctcgataacgcgatcggcgcgaacttcgcggtaattggctggggatgcaatccactgtgggggatgagcgacgagcaaatccagcagtggcgcgcgttgggcacacgcttcattcaggtggtgccggaagtgcaaattcataccgcacaggataaccacgacggcgtactacgcgtgggcgatacgcaaggtcgcctgcgtagctggttcgcgcaacacaatgcttcgctggtggtgatgcgcccggatcgctttgttgccgccaccgccattccgcaaaccctgggcaagaccctgaataaactggcgtcggtgatgacgctgacccgccctgatgccgacgtttctgtcgaaaaggtagcctgatatgcacgcttatcttcactgtctttcccactcgccgctggtggggtatgtcgacccggcgcaagaggtgctcgatgaggtcaatggcgtgattgccagcgcccgcgagcgtattgcggcattctcccctgaactggtggtgctgtttgcgccagatcactacaacggctttttctatgacgtgatgccaccgttctgtttaggcgttggagcgacggcaattggtgatttcggcagtgcggcaggagagctgcccgtgcctgtggagctggcggaggcctgtgcgcatgccgtcatgaagagcgggatcgatcttgccgtttcttactgtatgcaggtggaccacgggttcgcccagccgctggagttcctgctcggtgggctggataaggtgccagttctgcctgtgttcatcaacggtgtcgccacgccgctgcccggtttccagcgtacccgcatgttgggtgaagccattggacgtttcaccagcactctcaataaacgcgtgctgttcctgggttccggtgggctttcccatcagccgccggtgcccgaactggcgaaagccgatgcccatatgcgcgaccgtctgttggggagcgggaaagatttacccgccagtgagcgcgaattgcgtcagcaacgggtgattagcgccgctgagaagtttgttgaggatcagagaacgctgcatccgctcaacccgatttgggataaccagttcatgactttgctggagcagggacgcatacaggaactggatgccgtcagtaacgaagagctttccgccattgccggaaagtcgacacatgaaatcaaaacctgggtcgccgcttttgccgctatttctgcgtttggcaactggcgtagcgaagggcgttattaccgcccaatcccggagtggattgccggatttggctcgttaagcgccagaacagagaactgaatatgcaggagaagatgatgagttatcagccacaaaccgaagccgccaccagccgttttctgaatgtagaagaagcgggtaaaacgctgcgcatccattttaatgactgcggacaaggcgacgaaaccgttgtcctgctgcatggttccggcccgggtgctactggctgggcgaacttcagccgcaatatcgatccgctggtagaggcgggctatcgggtgatcctgctggattgtccgggttggggcaagagcgattcggtcgttaatagtggttcgcgatcggatcttaatgcacgaatcctgaaaagcgtggtggatcaactggatatcgccaaaatccacctgctgggcaactcgatggggggccatagttctgtggcgttcacccttaaatggccggagcgcgtcggcaaactggtgctgatgggcggcggtacgggcggcatgagtttgtttacgccgatgccaaccgaaggtattaagcgactgaatcagctttatcgtcagccgactatcgaaaacctgaagctgatgatggatatcttcgtttttgataccagcgatttgaccgacgccctgtttgaagcgcgcctgaataatatgctgtcgcgccgcgatcacctggaaaacttcgttaagagcctggaagctaatccgaaacagttcccggattttggcccacgtctggcggaaatcaaagcgcaaaccctgattgtctgggggcgcaacgaccgctttgtgccgatggatgcgggtctgcgtctgctgtccggcattgccggttctgaactgcatatcttccgcgactgtggtcactgggcgcagtgggaacatgccgacgctttcaatcaactggtgctgaatttcctcgcacgcccttaaggaatggtcatgacgaagcatactcttgagcaactggcggcggatttacgccgcgccgcagagcagggcgaagcgattgcaccgctgcgcgatctgattggtatcgataacgctgaagcggcttacgccattcagcacataaatgtgcaacatgacgttgcgcaggggcgtcgcgtggtagggcgtaaagtgggcctgacacatccgaaagtgcaacaacaactgggcgttgatcaaccggattttgggacgttatttgccgacatgtgttatggcgataacgaaatcattcctttttcccgtgttctgcaaccccgcattgaagcggagatcgcactggtgttgaaccgcgatttgcccgcaaccgatatcaccttcgacgaattgtataacgccattgaatgggtacttccggcgctggaagtggtggggagccgcattcgcgactggtcgattcagtttgtcgataccgtggcagataacgcctcctgtggggtgtatgtcatcggcggtccggcgcaacgtccggcggggttagacctgaaaaactgcgccatgaagatgacgcgtaataacgaagaggtttctagcgggcgcggcagcgaatgcctgggacatccgcttaatgcggccgtctggctggcacgcaaaatggccagtctgggtgaaccgctgcgcaccggagatatcattcttaccggggcattaggtccgatggtggcggtgaatgcgggcgatcgttttgaagcccatattgaaggcataggttcagttgctgcgacattttcaagcgcagccccaaaaggaagtctgtcatgagtaagcgtaaagtcgccattatcggttctggcaacattggtaccgatctgatgattaaaattttgcgtcacggtcagcatctggagatggcggtgatggttggcattgatcctcagtccgacggtctggcgcgcgccagacgtatgggcgtcgccaccacccatgaaggggtgatcggactgatgaacatgcctgaatttgctgatatcgacattgtatttgatgcgaccagcgccggtgctcatgtgaaaaacgatgccgctttacgcgaagcgaaaccggatattcgcttaattgacctgacgcctgctgccatcggcccttactgcgtgccggtggttaacctcgaggcgaacgtcgatcaactgaacgtcaacatggtcacctgcggcggccaggccaccattccaatggtggcggcagtttcacgcgtggcgcgtgttcattacgccgaaattatcgcttctatcgccagtaaatctgccggacctggcacgcgtgccaatatcgatgaatttacggaaaccacttcccgagccattgaagtggtgggcggcgcggcaaaagggaaggcgattattgtgcttaacccagcagagccaccgttgatgatgcgtgacacggtgtatgtattgagcgacgaagcttcacaagatgatatcgaagcctcaatcaatgaaatggctgaggcggtgcaggcttacgtaccgggttatcgcctgaaacagcgcgtgcagtttgaagttatcccgcaggataaaccggtcaatttaccgggcgtggggcaattctccggactgaaaacagcggtctggctggaagtcgaaggcgcagcgcattatctgcctgcctatgcgggcaacctcgacattatgacttccagtgcgctggcgacagcggaaaaaatggcccagtcactggcgcgcaaggcaggagaagcggcatgaacggtaaaaaactttatatctcggacgtcacattgcgtgacggtatgcacgccattcgtcatcagtattcgctggaaaacgttcgccagattgccaaagcactggacgatgcccgcgtggattcgattgaagtggcccacggcgacggtttgcaaggttccagctttaactatggtttcggcgcacatagcgaccttgaatggattgaagcggcggcggatgtggtgaagcacgccaaaatcgcgacgttgttgctgccaggaatcggcactattcacgatctgaaaaatgcctggcaggctggcgcgcgggtggttcgtgtggcaacgcactgtaccgaagctgatgtttccgcccagcatattcagtatgcccgcgagctcggaatggacaccgttggttttctgatgatgagccatatgaccacgccggagaatctcgccaagcaggcaaagctgatggaaggctacggtgcgacctgtatttatgtggtggattctggcggtgcgatgaacatgagcgatatccgtgaccgtttccgcgccctgaaagcagagctgaaaccagaaacgcaaactggcatgcacgctcaccataacctgagtcttggcgtggcgaactctatcgcggcggtggaagagggctgcgaccgaatcgacgccagcctcgcgggaatgggcgcgggcgcaggtaacgcaccgctggaagtgtttattgccgccgcggataaactgggctggcagcatgggaccgatctctatgcgttaatggatgccgccgacgacctggtgcgtccgttgcaggatcgaccggtacgagtcgatcgcgaaacgctggcgctgggatacgctggtgtttactcgagcttcctgcgtcactgtgaaacggcggcggcgcgttatggcttaagtgcggtggatattctcgttgagctgggcaaacgccggatggttggcggccaggaggatatgatcgttgacgtggcgctggatctgcgcaacaacaaataatgatgactgccgagaacgtgcattttgtatgcccatcccagcacgactgccggatgcggcgtgaacgccttatccggcctacggatggcgtgagaatttgtaggtctgataagacgcgttagcgtcgcatcaggcatctgcgcacgactgccggatgcggcgtgaacgccttatccggcctacggatggcgcgggaatttgtaggcctgataagacgcgttagcgtcgcatcaggcatctgcgcacgactgccggatgcggcgtgaacgccttatccggcctacgggtggcgcgagaatttgtaggcctgataagacgcgttagcgtcgcatcaggcatctgcgcacgactgccggatgcggcgtaaacgccttatccggcctacggatggcgcgggaatttgtaggcctgataagacgcgttagcgtcgcatcaggcatctgcacacgactgccggatgcgataaacgtcttgtccggcctacatttcgcccgtaggcagtcattaaatagttctgattacgcggctggcaatgtatcagtcgcgattcacctgcactcgcaacgaggttcatcttatgtcgactcgtaccccttcatcatcttcatcccgcctgatgctgaccatcgggctttgttttttggtcgctctgatggaagggctggatcttcaggcggctggcattgcggcgggtggcatcgcccaggctttcgcactcgataaaatgcaaatgggctggatatttagcgccggaatactcggtttgctacccggcgcgttggttggcggaatgctggcggaccgttatggtcgcaagcgcattttgattggctcagttgcgctgtttggtttgttctcactggcaacggcgattgcctgggatttcccctcactggtctttgcgcggctgatgaccggtgtcgggctgggggcggcgttgccgaatcttatcgccctgacgtctgaagccgcgggtccacgttttcgtgggacggcagtgagcctgatgtattgcggtgttcccattggcgcggcgctggcggcgacactgggtttcgcgggggcaaacttagcatggcaaacggtgttttgggtaggtggtgtggtgccgttgattctggtgccgctattaatgcgctggctgccggagtcggcggttttcgctggcgaaaaacagtctgcgccaccactgcgtgccttatttgcgccagaaacggcaaccgcgacgctgctgctgtggttgtgttatttcttcactctgctggtggtctacatgttgatcaactggctaccgctacttttggtggagcaaggattccagccatcgcaggcggcaggggtgatgtttgccctgcaaatgggggcggcaagcgggacgttaatgttgggcgcattgatggataagctgcgtccagtaaccatgtcgctactgatttatagcggcatgttagcttcgctgctggcgcttggaacggtgtcgtcatttaacggtatgttgctggcgggatttgtcgcggggttgtttgcgacaggtgggcaaagcgttttgtatgccctggcaccgttgttttacagttcgcagatccgcgcaacaggtgtgggaacagccgtggcggtagggcgtctgggggctatgagcggtccgttactggccgggaaaatgctggcattaggcactggcacggtcggcgtaatggccgcttctgcaccgggtattcttgttgctgggttggcggtgtttattttgatgagccggagatcacgaatacagccgtgcgccgatgcctgacgtgccttattaggcaggggcgaaagggacttcaccccaatacacctacggcgtttacaggtatactcgctaaaaattattcagcgggtttggaaacaaagatggcaaaacttaccttacaagagcagttgctcaaagcaggattagtcaccagcaaaaaagcggcgaaggtggagagaacggcgaaaaaatcgcgcgttcaggcgcgtgaagctcgggcggcggtagaagaaaataaaaaggcacagcttgagcgtgataaacagcttagcgaacagcaaaaacaagcggcgttggcgaaagaatataaagctcaggtgaagcagcttattgaaatgaaccgaatcaccattgccaatggcgatattggttttaacttcactgacggcaatctgattaagaagatttttgtcgataagctcacacaggcgcagttgattaatggtcgtctggcgattgcccgcttgttggtcgataacaatagcgaaggtgaatacgccattattcccgccagcgttgccgataaaattgctcagcgcgatgccagcagtatagtgttgcacagcgcgctcagcgccgaagagcaggatgaagacgacccgtatgccgacttcaaagtgcctgatgatttgatgtggtaaacatagataagtcgtgcgcagatgcctgatgcgacgctatgcgcgtcttatcaggcctacggtttatgggcgaagtgtagaccggataaggcgttcacgccgcatccggcagtcgtgcgccatgcctgatgcgacgctttgcgcgtcttatcaggcctacggcttacgggcgaagtgtaggccggataaggcgttcacgccgcatccggcagtcgtgctattatcaacgcatattcagtttattggcgtggtaggcaatatgctcgccaataaaactggagacaaaataatagctgtgatcataaccctcgtgataacggattaacgtcttgatattcatctcctggcagatcttttcaagatttggagtccgcagctgttctgcgtaaaaatcatcactcaacccctgatcaaccatgatttccgcaacgcgttgaccttgtgaaataagactcaccgggtcgtaatccaaccaggcatctttattttcagcaagatatgcagcaaaggcttgctgtccccacggcacttgcgatggggagacaatgggcgaaaacgccgagacgctgacatattcatctgggttacgtaacgccagcaccagcgcgcccagcccgcccatagaatgaccagagatagactttttggccgttgccggaaaatgatgcatcactaaatccggcagctcgttgcggatatagtcatacattttgtaatgttcattccacggcgcttgcgtcgcgttcaggtaaaacccggcaccttgcccgagatcgtaacggtcagcatctgcgacatgactgcctcgcggactggtgtccggcgcaacaacaataatgttgtgctcagccgcgtaacgctgcatccccgatttagtaatgaaattctgctcgttgcaggtcaggcctgaaagccagtacagcaccggcaatttttcattcgcggcttttggtgggagatagacgccgacattcatttcacatttcagtgattgggaataatgccgatacatattttgccagccgccaaagctgacatgtttttcaatgagttccatcagtcattatctcagggttaatcccccggacggctgcccggggagagtattaagaacccccgcctgaagtggacggggtaaacctgcgggaaatcagtaacgaattacggttcgaatggatttgccttcatgcatcaggtcgaaggcgtcattaatttcatccaggctcatggtatgcgtgacaaacggttccagatcgatatcacctttcatcgcatcttcaaccatgcccggtaactgggaacgacctttcacgccgccaaacgcggaacctttccatacgcgaccagtgaccaactggaatggacgggtggagatttcctgaccggcaaccgcgaccccgatgatcaccgactgaccccagccgcggtgcgcactttccagcgccgcacgcatcacgttgacgttaccgatgcattcaaaggtatggtcgataccccatttgttgatatccaacaggacatcttttatcggtttgtcgtagtcattcgggttaatgcagtcggtagcaccgaagcgacgcgccagatcgaatttcttcgggttggtatcgatagcgataatccgacccgctttcgcctgacgcgcgccctgaaccactgccagaccaatcgcgccaagaccaaacacggcaacagaatcacctggctggactttagctgtgttgtgtaccgcgccaataccggtggtcacgccacagcccagcaggcagacgtgttcatggtttgcttctggattaatttttgccagagacacttccgcgactacggtgtattcactgaatgtagagcaccccatgtagtgataaagcggctgcccgttgtaagaaaaacgggtggtgccgtctggcatcaggcctttaccctgggtttcgcgaaccgcaacacagaggttagttttgccagaacgacagaactcacactcgccgcactccgcggtgtaaagcgggatcacatggtcgccaggtttgacgctggttacgccttcaccgacttcaaccacaacgccggccccttcgtgaccgagaaccaccgggaatacaccttccgggtcatcgccggagagggtaaatgcgtcggtatggcaaacgccggtatgggtgactttaattagcacttcaccttttttcggtggtgcaacgtcaatttcaacgatttccagcggtttaccgggagcaaatgcaacggcagcacgtgatttcatctctcgctcttcctcaatatggtaatagattcagctatttaagataggcacgaaccagttcaatagtgtcgtcaacggattggctgacttcgcggctgtagcagtcatttcggtcaaacgtttcccggatatggctttcaagcacttctgccatcagcccattagccgcgccccgaacggcagcgatctgttggagtatggcacggcattcggcatcaccctccagcgaccgttccagagcatcaatctgcccccgaatacgacgaactcgagtaaggacctttttcttctcttccggagtactgggcatttcgcacctcatcatctgcatgcaatatactataggggggtattctatatgtcaatgcatacccccctatagtatataacactggagaataaaatttatccggtgaatgtggtcggaaaacaaagaggaaaggggggggggctaatcggcagggaaggccgccccggatagcgggcggcagaaggaatcagaatttccaggtcagacgggctgcaagttgcagaccgttaaaatcatcggttggggtgtcgtaccacactttacctgccgtcagcccgagattaagttgctcagtcagcggttgaatacgttgcagactgacgctcttcatgctgccgtagcgtgtttctggcgtccagtcataggtgtaagcacctgttccgcggcttagccatagttgcgtataaccagtgccgcgcgggtcattcagacgcacggaaatcatattgctataactaccacctgcatcgctggagtcataatgggtatagcggtagctggtgatcaccgggccagtatagagtgatacgccgccttgccaggcatcgacttcgacatcatcgtaatatttagtgtagcgataaccggtcgtgaaaagcgtttttggtaacagggccaggttaatatcctgacgaaaatcctggcgggcaaagaccggcgtattatccgcaaaggcaatacccgttcgggttgtcagccagttattccatttataccagaccgcaccctgaccgcgagtggcattgaaatgttcagtttcataatcacgacgcccctgggaaagattaaaaagcagcgttgcgttttcaactttcgccaccagttcagcatacgctaaattacggttgccatgatcgccagaataatcggtaaaatcgtagcccgcggtaatggaagttaacccggcataagcgggcaatgcgctaaaaatggccgccgctaataacgtccgttttatcattttaatctcctgtacggataagttcttgtcggagtgaataagttccggtaggtaaattacgttctacaatcacgcgcgggccaagttgcgtgttcggggaaataattcgcccaggcaaaataataacttgtacgccaaggcgtgaacgctgcccgatataacaacctaatttatcgcatccggtagcgataattccctctggagttcgaacagacacgggctgttcatccagacgatgattactggtacgtacttgtgcgcctaaatatgcctggtttgcaactaccgagtcggcaataaaacattgcggaccaatcgttgcttccgcttcaataaccgcatttttaatctcggtggcaaaaccaatttttacgccattgctgattattgtgccaggacgaataaacgcataattactagactggccccctgaatctccagacaaccaatatcacttaaataagtgatagtcttaatactagtttttagactagtcattggagaacagatgattgatgtcttagggccggagaaacgcagacggcgtaccacacaggaaaagatcgcaattgttcagcagagctttgaaccggggatgacggtctccctcgttgcccggcaacatggtgtagcagccagccagttatttctctggcgtaagcaataccaggaaggaagtcttactgctgtcgccgccggagaacaggttgttcctgcctctgaacttgctgccgccatgaagcagattaaagaactccagcgcctgctcggcaagaaaacgatggaaaatgaactcctcaaagaagccgttgaatatggacgggcaaaaaagtggatagcgcacgcgcccttattgcccggggatggggagtaagcttagtcagccgttgtctccgggtgtcgcgtgcgcagttgcacgtcattctcagacgaaccgatgactggatggatggccgccgcagtcgtcacactgatgatacggatgtgcttctccgtatacaccatgttatcggagagctgccaacgtatggttatcgtcgggtatgggcgctgcttcgcagacaggcagaacttgatggtatgcctgcgatcaatgccaaacgtgtttaccggatcatgcgccagaatgcgctgttgcttgagcgaaaacctgctgtaccgccatcgaaacgggcacatacaggcagagtggccgtgaaagaaagcaatcagcgatggtgctctgacgggttcgagttctgctgtgataacggagagagactgcgtgtcacgttcgcgctggactgctgtgatcgtgaggcactgcactgggcggtcactaccggcggcttcaacagtgaaacagtacaggacgtcatgctgggagcggtggaacgccgcttcggcaacgatcttccgtcgtctccagtggagtggctgacggataatggttcatgctaccgggctaatgaaacacgccagttcgcccggatgttgggacttgaaccgaagaacacggcggtgcggagtccggagagtaacggaatagcagagagcttcgtgaaaacgataaagcgtgactacatcagtatcatgcccaaaccagacgggttaacggcagcaaagaaccttgcagaggcgttcgagcattataacgaatggcatccgcatagtgcgctgggttatcgctcgccacgggaatatctgcggcagcgggcttgtaatgggttaagtgataacagatgtctggaaatataggggcaaatccaattacctatcaggcagtttgcgccaatcactaccggaccctgaataacggcaccatgacaaatacgggtattcgcgccgataacaacttcacctgcagtttcatcaataattacctggtctgcaatctgaatatttttctctttaacattaagcttcagatagtttttcagttcctgtgacagaaggttgggaataagcggttgacgcttccaccagtgcggaatagcgggtgggtttgtcgcgctgaggttcgcgtccagtaaaaaaggcaataagtccataaataatccagatggcataagctaataatacatacacaacggaaagcggcgctaaaggcaccaacaaccagcaacgatgaaaccaggcgctaaaagcaccaataacacaaactacgccgacccagataagcggaaacattgccaacaccactccatgcggcccggtggtgatgaattcattaaaccaggtagtgagataaatcccaacgccataaagcacaaccaacagcataggaaatatactgaagataccgaagcggctaaataaaagtcttttatgcaggcgcatacagaccgcgtatcccacaatccaacgccgccagcgacgccactcctcacgcgggctgttgcattcctgtgggtatacgatgcagcgattcgcctgccgaatacggtagccgtttgccaccaatgtccaggtgagatcaaggtcttcgactttagtacgatccgagaaaccgaacttacgcaatacatcagtacggaacatcccgcaggcaccgctgataataaacggtgcgccacccaggagctgctgtagcgtgcgcttcataacaatcatcggcaactttacggtcgcgcggatgtgcggtaacagacccgcgcctttcaacgcagtagagggaatgccgcctacggcatcggcaccgcgctcaatttctgccagcatatagcccattccgtcttgatcgggcggaacataggtgtcggcatcacttaaaaaaacctggtcgcaggtggcgtaattgaggccattcatcagcgcaccacctttaccggtatttttttgcgtgacggcaacaaagcggtcgccccatttgcgtttgacttccgccatgaccgcttcggtattgtccgtggagccgtcgttaacgcaaattacccggcaaaaataagggttacgcagtagattatccagtgactgcgccagacacgggccttcgttatacgcaggtataatggcgtcaatacagcctttcttttgactgggtttacgtcttagcgtacttaaaaaccatagcaacattgctatggacatacagataaatatccaggttttcatgcaatttgctcaaagaatcattttatgaattacaaagccttcacccagatcgctattgacctgttgtccgcgaaattgtgcaactgcacgcaggcgatcatgacgcatataatcgcgtcgttcctagcttttatgtttttttaatgcagcaagtttgactgtgaaatattcttctttaacggattcaaaaacctgaggcataaatgaaagccaggtacttggggtttcgtagccgagaatttgcggaatagttcggcaggcaaccattgaagcttgataaacagcaagatgatcctgatggcggtcggcatcatgcatggtatatacccgcatgatttcaacatcagaaggaatttgatttttaatgatgtcttccagggcggaaatcatatcattgagctgtaaatgagcgcgggtgtcagcaaaattaagatgaatagtttggtggcaccctaatatctttagggcgttgcgcgattcttcatggcgatcgattattccatctgtgccagagttgccggtagtcatcaccacggctgcgatataaattcctttttgcgcaagacgagcaagcgatgcgccacagcctaattctatatcgtcaggatgtgcgccaatagcaaggataccctttcttttatttgccgaagaaaggagggctgaatctaaaaccttatccacttaatgacactccattttatttattatactacaagcacaacgatgcactcagagacgtaatctctggcgcagccagatgttaatttataaatgttaaatgttgctaataactgaaaagcaagggctttcagacccgtgggttcgactgggtaatgtttctatgcaattcatatgttaagtgtttgtatgtttggtatgtatagttattttgttttatacattgtatttagatgtgatttagtttgtcaattaattgcatttaaaaaatatgttctgtgaacaagcattgtttatatacattatgtgaatgtaatatgcgagtgattgagaatgatacagtgatatatacaatgcgaatataatagttttattatatgtattgatattgatagaaataatgaagtaataaatctcgtaatgtggttgtttatgcatcactaaaatgaagtgtagtaattttcccaattgttagaacggagtaattgcatatttaatctttccttagccgtttttttgctaagaataaaatcatctgtgcgataacgactaattcttttaatgaatgtttttattcctgaatactgctcccataacaagacaggggagcagacaatcatggcaatttcatcgcgtaacacacttcttgccgcactggcattcatcgcttttcaggcacaggcggtgaacgtcaccgtggcgtatcaaacctcagccgaaccggcgaaagtggctcaggccgacaacacctttgctaaagaaagcggagcaaccgtggactggcgtaagtttgacagcggagccagcatcgtgcgggcgctggcttcaggcgacgtgcaaatcggcaacctcggttccagcccgttagcggttgcagccagccaacaggtgccgattgaagtcttcttgctggcgtcaaaactgggtaactccgaagcgctggtggtaaagaaaactatcagcaaaccggaagatctgattggcaaacgcatcgccgtaccgtttatctccaccacccactacagcctgctggcggcactgaaacactggggcattaaacccgggcaagtggagattgtgaacctgcagccgcccgcgattatcgctgcctggcagcggggagatattgatggtgcttatgtctgggcaccggcggttaacgccctggaaaaagacggcaaggtgttgaccgattctgaacaggtcgggcagtggggcgcgccaacgctggacgtctgggtggtgcgcaaagattttgccgagaaacatcctgaggtcgtgaaagcgttcgctaaaagcgccatcgatgctcagcaaccgtacattgctaacccagacgtgtggctgaaacagccggaaaacatcagcaaactggcgcgtttaagcggcgtgcctgaaggtgacgttccggggctggtgaaggggaatacctatctgacgccgcagcaacaaacggcagaactgaccggaccggtgaacaaagcgatcatcgacaccgcgcagtttttgaaagagcagggcaaggtcccggctgtagcgaatgattacagccagtacgttacctcgcgcttcgtgcaataaaaggaggcgcagatgctgcaaatctctcatctttacgccgattatggcggcaaaccggcactggaagatatcaacctgacgctggaaagcggcgagctactggtggtgctggggccgtccggctgcggtaaaaccaccctgctgaatctgattgccggttttgtgccttatcagcatggcagcattcaactggcgggtaagcgtattgagggaccgggagcagagcgtggcgtagtttttcagaatgaagggctactaccgtggcgcaatgtacaggacaacgtggcgttcggcctgcaattggcaggtatagagaaaatgcagcgactggaaatcgcgcaccagatgctgaaaaaagtggggctggaaggcgcagaaaaacgctacatctggcagctttccggtggtcaacgtcagcgggtggggattgctcgtgcgctggcggcgaatccccagctgttattactcgacgaaccgtttggtgcgctggacgccttcacccgcgaccagatgcaaaccctgctgctgaaactctggcaggagacgggcaagcaggtgctgttgattacccacgatatagaagaagcggtgtttatggcgactgaactggttctgctttcatccggccctggccgtgtgctggagcggctgccgctcaactttgctcgccgctttgttgcgggagagtcgagccgcagcatcaagtccgatccacaattcatcgccatgcgcgaatatgttttaagccgcgtatttgagcaacgggaggcgttctcatgagtgtgctcattaatgaaaaactgcattcgcggcggctgaaatggcgctggccgctctcgcgtcaggtgaccttaagcattggcacgttagcggttttactcaccgtatggtggacggtggcgacgctgcaactgattagcccgctatttttgccgccgccgcaacaggtactggaaaaactactcaccattgccggaccgcaaggctttatggacgccacgctgtggcagcatctggcagccagtctgacgcgcattatgctggcgctatttgcagcggtgttgttcggtattccggtcgggatcgcgatgggacttagccctacggtacgcggcattctggatccgataatcgagctttatcgtccggtgccgccgctggcttatttgccgctgatggtgatctggtttggtattggtgaaacctcgaagatcttactgatctatttagcgatttttgcaccggtggcgatgtcggcgctggcgggggtgaaaagcgtgcagcaggttcgcattcgtgccgcccagtcgctgggtgccagccgtgcgcaggtgctgtggtttgtcattttgcccggtgcgctgccggaaatcctcaccggattacgtattggtctgggggtgggctggtctacgctggtggcggcggagctgattgccgcgacgcgcggtttaggatttatggttcagtcagcgggtgaatttctcgcaactgacgtggtgctggcggggatcgcggtgattgcgattatcgcctttcttttagaactgggtctgcgcgcgttacagcgccgcctgacgccctggcatggagaagtacaatgagtgaacgtctgagcattaccccgctggggccgtatatcggcgcacaaatttcgggtgccgacctgacgcgcccgttaagcgataatcagtttgaacagctttaccatgcggtgctgcgccatcaggtggtgtttctacgcgatcaagctattacgccgcagcagcaacgcgcgctggcccagcgttttggcgaattgcatattcaccctgtttacccgcatgccgaaggggttgacgagatcatcgtgctggatacccataacgataatccgccagataacgacaactggcataccgatgtgacatttattgaaacgccacccgcaggggcgattctggcagctaaagagttaccttcgaccggcggtgatacgctctggaccagcggtattgcggcctatgaggcgctctctgttcccttccgccagctgctgagtgggctgcgtgcggagcatgatttccgtaaatcgttcccggaatacaaataccgcaaaaccgaggaggaacatcaacgctggcgcgaggcggtcgcgaaaaacccgccgttgctacatccggtggtgcgaacgcatccggtgagcggtaaacaggcgctgtttgtgaatgaaggctttactacgcgaattgttgatgtgagcgagaaagagagcgaagccttgttaagttttttgtttgcccatatcaccaaaccggagtttcaggtgcgctggcgctggcaaccaaatgatattgcgatttgggataaccgcgtgacccagcactatgccaatgccgattacctgccacagcgacggataatgcatcgggcgacgatccttggggataaaccgttttatcgggcggggtaatacgagagtggacggtcccctcgcccccttggggagagggttagggtgagggggcgttcaccgtactttcaacaggttaactccccctttctgagaggaaacaaaattaacgcagaatcttcttctcagccaaatccagcgcaaagtagctgaaaatcagatccgcacccgcacgcttaatcgaacctaagctttcgagcacgactttctcttcatctatagcacccgccagcgcggcgaacttaatcatcgcatactcaccgctcacctgatacgcgccaatcggcaattcagtacgttcacgcagctcacgcacgatgtcgaggtacgctccagcaggtttaaccatcaggcagtctgcgccctgggcttcatccagcagtgattcacgaatcgcctcacgacggttcattgggttcatctgatagcttttgcggtcgccttttaatgcgcttccggcagcttcacggaacgggccataaaaggaggaggcgaacttggtcgaatacgacataatcgccgtatctttaaatcccgcagcgtccagcgcctgacgaatcgcctgtacctggccgtccatcgcggcggaaggggcgatgaagtctgcacctgcagcagctgcaaccacggcttgcttgcctaaattttccagagtcgcgtcgttgtcgacgccatgctcgcacagcacaccgcagtgaccgtgagaagtgtattcacagaagcaggtgtctgacataacgatcatttctggcacggtctgcttgcagatgcgcgacatacgcgccaccagtccatcttcccgccaggcatcgctgccggtttcatcggtatggtgagagatgccaaaagtcatcacggaacgaataccggcgttggcgatgcgttcaatttcgcgtgccagatgtttctctggaatgcgcatcacgcctggcatggcttcaacggctttgtagtcgtcaatttcttcttcaacaaagatcggcaacaccaggtcgttaaggctaagtgttgtctcttcaaacatagcgcgcagcgcaggagatttgcgcaggcgacgagggcgttggattaagtctgtcatggtctgcctgatgtttgtggaatcgaggggcatagtatacctgaagcagggtagggatgttttacgaaagttgtcgcgatgttgacaagaagagaatggaagagaggccaggacatctttttaatagaaacagcaataattttatattcactgaaaatatttttaatctttatttatagctgttggttattattttttggagtttggttgcgctgctataaattgaataattaaaactttgttgcatattcataggatatttatctggtttgtgtttgtgatatttattatgcgtatgcttcaaaaacaaaattatctgcaacatgttgaaatactgtgcttttatgaatttgatgcgtgtttttctccataaattatatatgtccacattcggacttaggggaaagaataattgaaccattcgtctgtaacgcagcataatcgttagcgcgaaacataatatgttttctatgcattgataattgatggatcaacttattacgtccctgaggagggatgacaaatgcactcctggaaaaagaaacttgtagtatcacaattagcattggcttgcactctggctatcacctctcaggctaatgcagcaaactatgatacctggacttatatcgataatcccgttacagcacttgattgggatcatatggataaggcaggcactgtagatggcaactatgtaaactatagtggttttgtctattacaacaacaccaatggtgatttcgatcagtcctttaacggcgataccgttaacggcacgatctcaacctattatttgaaccatgattatgcagacagtactgctaatcagcttgatatcagtaattcagtgattcacggttcgattacttctatgctgcctggcggttattatgatcgttttgatgcagatggtaataatctgggtggatatgatttttacactgatgcggttgttgatacacactggcgtgatggtgatgttttcactttgaacattgctaacactactattgatgatgattatgaagctctttacttcactgattcttataaagatggtgatgtaaccaagcacacaaatgagacatttgatacaagtgaaggcgttgctgttaatcttgatgtagaaagtaacatcaatatttccaataactcccgcgttgcaggtattgcattatctcaaggtaatacttacaacgaaacctacactaccgaatctcatacttgggataacaatatctctgtaaaagattccacagtgacttcgggttcaaattatatcctggatagcaatacttatggcaaaactggtcactttggcaattctgatgaaccgagtgattatgctggcccgggtgatgttgcaatgtcctttactgcttcaggttccgactatgcgatgaagaacaatgtattcctcagcaattcaacgctgatgggtgatgttgcctttaccagcacctggaatagtaattttgatccgaatggtcatgattccaacggtgacggggtgaaagataccaacgggggttggactgatgatagcctcaacgttgatgaactaaatctcactctcgataacggaagcaagtgggttggtcaggcaatttataacgttgctgaaacgtcagcaatgtatgatgttgctacaaacagccttactcctgatgcaacatatgaaaacaatgactggaaacgtgttgttgatgacaaggtcttccagagcggtgtatttaacgtagcgttgaataacggttctgaatgggatactacaggtcgttccatcgttgataccttgacagttaataatggttctcaggttaatgtttcggaatctaaattaacttcagatactatcgatttaactaacggttcttcgctgaacattggtgaagatggctacgttgataccgatcatctgactattaactcctacagtactgttgcgttgaccgaatctactgggtggggggctgattgatcctacccacgtaatatggacacaggcctaagcgaggttcttgttttcaaattgttccggactgaggccgccacaccaactgtgccgccgccaccgattgtaatcacattcgatataattaaacaccgttgcccgcattatttcccggctgataaagtgttctccatggatacattccactttcagcgaatgaaagaagctttccacgcaggcattatcgtagcagcaaccttttgcgctcatacttccacgcagattatgccgcttcagttgcgcctgataatctgctgaacagtactggcctccacggtccgtgtgaacgataacgttccggggcctcttacgccgccacagcgccatctgcagggcatcgcaggccagttgcgccgtcatgcgtggcgacattgaccagccaataacggcacgtgaccacaggtcaatgaccactgccagatacagccagccttcatctgtacgtaagtacgtgatgtctcctgcccacttctggttcgggccactggcgtaaaaatcctgctccaacagattttctgacacaggcaggccgtgtgcgcggtagctgaccgggctgaacttccgggaggcctttgccctcagtccctgacggcgcaggcttgccgccacggtttttacgttaaaggggtaaccctgagcacgcagttcatccgtcaggcgtggggcaccgtaacgctgttttgaccgggtaaaagccgcgaggacaacgctgtcgcagtgttggcggaactgctgacgcgtgcttatccttgtccgccgctgacaccacgtataccagccgctgcgggccacccggagcacgcggcacattgctttgatgctgaactcagcctgatgtttttcaataaagacatacttcatttcaggcgcttcgcgaagtatgtcgcggccttttggaggatagccagctcttcatcccgttctgccagctggcgtttgagacgtgcaatctcggtagacatctccagttcacgttcagaagacgtctgctgattttgctgtttactgcgccagttgtagagttgtgattcatacaggctgagttcacgggctgcggcagtaacaccgatgcgttcagcaagcttcagggcttcactgcgaaattcaggcgaatgctgtttacggggttttttactggttgatactgtttttgtcatgtgagtcacctctgactgagagtttactcacttagccgcgtgtccactattgctgggtaagatcagattacaacctgtacgccaatactatcaccgtaactaacggcggtgtattggatgtgaacgttgatcagttcgatactgaagctttccgtactgacaaactggaactgaccagcggcaacatcgctgaccataacggtaacgtagtatctggtgtgttcgatatccatagcagcgattacgttctgaacgctgatctggtgaacgaccgtacctgggatacttccaagtctaactacggttacggtattgttgctatgaactctgatggtcacctgactatcaacggtaacggcgacgtagacaacggtactgaactggataacagctctgtagacaatgttgttgctgcaaccggtaactacaaagttcgtatcgacaacgcaactggcgctggcgctatcgctgattacaaagataaagaaattatctacgtaaacgacgtcaacagcaacgcgaccttctctgctgctaacaaagctgacctgggtgcatacacctatcaggctgaacagcgcggtaacaccgttgttctgcaacagatggagctgaccgactacgctaacatggcgctgagcatcccgtctgcgaacaccaatatctggaacctggaacaagacaccgttggtactcgtctgaccaactctcgtcatggcctggctgataacggcggcgcatgggtaagctacttcggtggtaacttcaacggcgacaacggcaccatcaactatgatcaggatgttaacggcatcatggtcggtgttgataccaaaattgacggtaacaacgctaagtggatcgtcggtgcggctgcaggcttcgctaaaggtgacatgaatgaccgttctggtcaggtggatcaagacagccagactgcctacatctactcttctgctcacttcgcgaacaacgtctttgttgatggtagcttgagctactctcacttcaacaacgacctgtctgcaaccatgagcaacggtacttacgttgacggtagcaccaactccgacgcttggggcttcggtttgaaagccggttacgacttcaaactgggtgatgctggttacgtgactccttacggcagcgtttctggtctgttccagtctggtgatgactaccagctgagcaacgacatgaaagttgacggtcagtcttacgacagcatgcgttatgaactgggtgtagatgcaggttataccttcacctacagcgaagatcaggctctgactccgtacttcaaactggcttacgtctacgacgactctaacaacgataacgatgtgaacggcgattccatcgataacggtactgaagggtctgcggtacgtgttggtctgggtactcagtttagcttcaccaagaacttcagcgcctataccgatgctaactacctcggtggtggtgacgtagatcaagactggtccgcgaacgtgggtgttaaatatacctggtaatattcttcactccgaagaaatactggtaatttaatctaaataatgcccgtcaaggatttgacgggcattactgcaaaggacgcgcaaatgttatctgtagttaaacctcttcaggaatttggtaagctcgataaatgtttgtccagatacggtacgcgcttcgagtttaataatgaaaagcaagttatattttccagtgatgtcaataacgaagatactttcgttattttagagggagttatctctctgcgtagagaagaaaacgtacttatcggtattacccaggctccttatattatggggctggctgatggtttaatgaaaaacgatataccatacaaattaatatcagaaggaaattgtacgggatatcatctaccagccaaacaaaccattacgcttattgaacaaaatcaactctggcgagacgctttttactggttagcctggcaaaatagaattctggaattacgcgacgtgcagctcattgggcataattcctacgaacaaatccgcgcaacattattatcaatgattgactggaatgaagaattgcgatcacgtattggtgtgatgaattatatccatcaacgtacacgcatatcgcgttctgtcgtcgcagaagttctcgctgctttgcgtaaaggcggctatatcgaaatgaataaaggcaaactggtcgctatcaaccgtttgccttcagagtattaatcaggacgcggggataaccaacggtttattcccgcttagctcggtcaccaggtcattgatgccatcgctcatatttttaaagcgcgtcaacggcgaacgagtgaccaccacaaacgcgccaatattcttctgcgggatcatcgccatataggtaatgaaaccgccaccaccgcctgtcttctgaataatccccggacgaccctctttcggggccatatatacccaacctaaaccaagcgcatccgctttgccggggacatccatgccaatcactttcgtaaactgcgcgcgctgataaatcaacgtctgcatgcgatctgcctggttactgcgctgataaaaatcagatgacaaatactgctgcatccagcgcatcatatcgccaggcgtggaatagacgccgccgctgccaattgccgccagcgtgttattgcacggactggcaccgcgctcagcaaccattaaacggcggcactgatccggtgagggggtgtaggtggtgtctttcatccccaatggacgggtaatctgctcttcaaacaactgggtataaggcttgccggacgcattcgccagtgcatctgccagcaggtcgaacgcaaggttagagtacgccgcctgactgcctggcgcggctttcagcttcgccgtagaaaggtatttccagcgttgctcgcgcgttggccagacaaacaccggacgatgtgccgcgccaccgggctgttcacggggcagggcgctggtatgggttgccagattgaccagcgtaatgggcgtcccattgtaggttggcacgcgtgcgcctggcggagcatatttacttagcggatcgtttaacttcacggtcccctggtcgagcaatttcaccagcatctcactggtcattagcttggtgagggaagcaatacgcacgaccgaatccagctgcgggcgaacgttattaccaggtcgcgtttcgccataactgcgaaagacgcgctggttaccgtcgataacaaccagagccatccccgtggcaccgctgccgtaaaaaatatgatcggcataacgatcgacaatatcagaggcaaactccggttcagtgatcggctgcgccgcatggacggaggtcaatgacgccgcacacagcacggcagaaaaaagcagactacgtttcaacggtggtgtccatagattgaatgaaggtaactgagcgtatttatactactcattgatagattgcaaagggcgaattagtgcaataatagtgttaaaaacgtaacggcgcgtaaacacgatctttttcctgctcaccaatgcctgcatttgtgatcctgcgcgtgttaatccgcttatgtaaacaatctttggtttgtgaaatccgtcgaaacaattcttatggtcaggctggcgaactaagcgccttgctatgggtcacaatgggcggtttcatttggctgacgctttgtagcggtcatgcggttaatacacagcagttgttaaaacgataagaagttagcaggagtgcatatgtttaagtcttttttcccaaagccgggaacgttttttctctcggccttcgtttgggcattgattgccgttatcttctggcaagccggtgggggtgactgggtggcgcgtatcaccggcgcttccgggcagatcccgattagcgccgcgcgtttctggtcgttggatttcctgattttttacgcttactacattgtttgcgtaggactttttgcattgttctggtttatctacagcccgcatcgttggcaatactggtcaatactcggtactgcactgatcatcttcgtcacctggtttttggtggaagtcggggtcgccgtcaacgcctggtatgcgccgttctatgatctgattcaaaccgcgctaagttcgccgcataaagtcaccatcgaacaattttaccgcgaagtgggcgtctttctggggattgcgctgatcgctgtggtgatcagtgtgctgaacaacttctttgtcagtcactacgtgttccgctggcgtacagcgatgaacgaatattacatggcgaactggcaacaactgcgtcatatcgaaggggccgcacagcgtgtgcaggaagacaccatgcgttttgcttcaacgctggagaatatgggcgtcagttttatcaacgccatcatgacgttgatcgccttcctgccggtgctggtaacgctctccgcgcatgtgccggagctgccgattatcgggcacattccgtatggtctggtgattgccgcaatcgtctggtcgctgatggggaccggattgctggcagtggtagggatcaaactgccggggctggagtttaaaaaccagcgtgtagaggctgcctaccgtaaagagctggtttatggtgaagacgatgccacgcgcgcgacgccgcctacggtacgcgagctgtttagcgccgtacggaaaaactatttccgcctctattttcactatatgtatttcaacatcgcccgcattctctatttgcaggtcgataacgttttcggtttgttcttgctgtttccgtcaattgttgccggtacgattacgctcggcctgatgacgcagattaccaacgtttttggtcaggttcgcggtgctttccagtacctgattaactcatggaccacactggttgagttgatgtctatctacaaacgtctgcgcagctttgaacatgagctggatggtgacaaaattcaggaagtaacccataccttgagctaaaaaggagaagtaatgtcgcgcgtcaatcctctatcttcgctgtcattgttggcggttctggttttagcggggtgtagtagtcaggctccgcaaccgttgaaaaagggcgaaaaagcgatagatgtagcgagcgtcgtgcggcagaagatgcctgcgagcgtgaaagaccgcgatgcctgggcgaaagatctcgccaccacctttgaaagtcaggggctggcaccgacgctggaaaacgtctgctcggtgctggcggtggcgcagcaggagtcaaattatcaggcagatccggccgttccgggcttaagcaagatcgcctggcaagagattgaccgtcgtgctgaacggatgcacattcctgcttttctggttcataccgcgctaaaaatcaaatcgccaaacggcaaaagttatagcgaacggttagattcggtgcgtacagaaaagcaattgagcgcgatttttgacgatctgatcaacatggtgccaatggggcagacgctgtttggttcgctcaatccggtgcgcaccggtgggccgatgcaggtcagcattgcttttgccgaacagcataccaaagggtatccgtggaaaatggacggtacagtccgtcaggaagtcttcagtcgccgcggcgggttgtggtttggtacttaccatttactgaattatcccgccagttatagcgcaccgatataccgttttgctgattttaacgctggctggtacgccagccgtaatgccgcgtttcagaacgcggtcagtaaggccagcggcgtgaagctggcactggacggtgatttaattcgttacgacagtaaagaacccgggaaaaccgaactggcaacgcgcaaactggctgcaaaactggggatgagcgacagcgaaattcgccgtcagttagagaaaggtgacagcttctcttttgaggagacggcgctgtacaagaaagtttatcaacttgccgaaacgaaaacgggtaaatcactcccccgcgaaatgttgcctggcattcaactggaaagcccgaaaatcacccgcaacctgactacggcctggtttgcgaagcgcgtagacgaacggcgggcgcgttgtatgaaacagtgatcaaacaggaatgtcaggccagataaggcgtttcaggccgcatctgacaatgtaaaacttactggcggcgatgtcgccagtgcagccatagcgccaccactgcaaaaatgaggcagcctactaaaaacgggatcagcccgaaaatggtgccgacacctaaaccaatttccacccgtgggcgacctgtttcctggacctgcattaaacgctcatagacgccgggcgcatgcactaacaggttcagcaattgcgccccagcccaaaagcaaaacagcacaaacaacgcataggcaatgttgccaggcgttgaagaggcattgcgatattttccgctaaacagcgattttgacagggtgaaatcagccataaaaacctccggaagtcatctgcttctcttctggtgtgataccagcggcttatggcaagtctgacaggtcatttagattgtcaatatcagaatcatggtaaattgatgttgggaatattcccgaagcgtgaatcttcgttgtgagtcacaaaatggcaaccttaagttaaatttattaacaattacgaaaatgttgtctacaccacagacggttgttgcagaatatgcaaggatgttgtttttcgttaacggagctgccatgaatctgcctgtaaaaatccgccgtgactggcactactatgcgttcgccattggccttatattcattcttaatggcgtggtggggttactgggatttgaagcaaaaggttggcagacctatgccgtcggtctggtgacgtgggtgattagtttctggctggcggggttgattattcgtcgtcgcgatgaagaaactgaaaacgcccaataagaatattatcgggcgttaaaatattacattgtggttttcaatgcgttatccgcagcgtgacgctccagcgccagttcaatcaaacgtgtgatcagatcggtgtaacccagaccgctggcttgccacagcttcggatacatactgatattagtgaagccaggcagggtgttgatctcgttgatcaccacttcgttctctggggttaaaaacacgtctacacgcgccatgcctgcgcatcccaacgtttgataagcctgaacggcaatcgcccggatcttatcgttgatttctggcgcaatggctgccggaactaccactttcgcgccatcttcgtcaatgtacttggtgtcgtaggcatagaaatcgctggtgagtacgatctctccacaggtgctggcttgcggattgtcgttgcccagaactgcgcattcgatctcacgacctttgatcccttgctcaacgatcactttatgatcgaactcgaacgccagatcgacggcaattgcgtactgttcttcactggttactttgctgacaccaacagaagagccctgattagccggttttacaaacagtggtaaccccagtttagactccacttcggcaaaactaatgttgtgacgattggcgcgcgtcagggtaataaatggcgcaatgttcagcccggcatcgcgtagcagacgtttggtgacatctttgtccatacaggctgctgaagccagaacatcagaacctacaaacggtaaattggcgacccgcagcattccctgcaaggaaccatcttcgcccagcgtaccgtggacaatcgggaaaatgacatccaccgtcggcaacggctgaccgttttgcgcgtcgataagctgatgctcatgtttacctggcacctgcgcaaggctggtcgccgaagggcgcaacgcaatatgggcaggatcgtctgcatttagcagataattgctggcatcgctgacgtgccattgcccttgtttatcaatgcccagcagcacaacgtcgaagcgacttttatcaatggcatcgacaatgttttttgccgattgcagagacacttcatgttccgctgatttaccaccaaaaacgattcctacccgcagtttttccatcttaaaaacctatcccgtctaacacaaagtgcatacattaccacgacaaaacgggggattcgcggccttctgaaagattgttgcaatcttctgctgacaaagcgtgcaacgtactggtgaagaaagtgcgttatctcaaagatgtgcgcaagatcacaaaaatgatgaacgggaagctaatttattcctggcttaaatggccatgcggtgagtttttttctcttaattataagttaacgaagagaatatatttcataacttttatttataataaaggttgataattaaaagcctatattttgtgtgggtaattatttaaataagagaaacgtttcgctggtaatcaaacaaaaaatatttgcgcaaagtatttcctttgtcataaaaataatacttccagacactatgaagttgtgaaacataatgttaacttctccatactttggataaggaaatacagacatgaaaaatctcattgctgagttgttatttaagcttgcccaaaaagaagaagagtcgaaagaactgtgtgcgcaggtagaagctttggagattatcgtcactgcaatgcttcgcaatatggcgcaaaatgaccaacagcggttgattgatcaggtagagggggcgctgtacgaggtaaagcccgatgccagcattcctgacgacgatacggagctgctgcgcgattacgtaaagaagttattgaagcatcctcgtcagtaaaaagttaatcttttcaacagctgtcataaagttgtcacggccgagacttatagtcgctttgtttttattttttaatgtatttgtacatggagaaaataaagtgaaacaaagcactattgcactggcactcttaccgttactgtttacccctgtgacaaaagcccggacaccagaaatgcctgttctggaaaaccgggctgctcagggcgatattactgcacccggcggtgctcgccgtttaacgggtgatcagactgccgctctgcgtgattctcttagcgataaacctgcaaaaaatattattttgctgattggcgatgggatgggggactcggaaattactgccgcacgtaattatgccgaaggtgcgggcggcttttttaaaggtatagatgccttaccgcttaccgggcaatacactcactatgcgctgaataaaaaaaccggcaaaccggactacgtcaccgactcggctgcatcagcaaccgcctggtcaaccggtgtcaaaacctataacggcgcgctgggcgtcgatattcacgaaaaagatcacccaacgattctggaaatggcaaaagccgcaggtctggcgaccggtaacgtttctaccgcagagttgcaggatgccacgcccgctgcgctggtggcacatgtgacctcgcgcaaatgctacggtccgagcgcgaccagtgaaaaatgtccgggtaacgctctggaaaaaggcggaaaaggatcgattaccgaacagctgcttaacgctcgtgccgacgttacgcttggcggcggcgcaaaaacctttgctgaaacggcaaccgctggtgaatggcagggaaaaacgctgcgtgaacaggcacaggcgcgtggttatcagttggtgagcgatgctgcctcactgaattcggtgacggaagcgaatcagcaaaaacccctgcttggcctgtttgctgacggcaatatgccagtgcgctggctaggaccgaaagcaacgtaccatggcaatatcgataagcccgcagtcacctgtacgccaaatccgcaacgtaatgacagtgtaccaaccctggcgcagatgaccgacaaagccattgaattgttgagtaaaaatgagaaaggctttttcctgcaagttgaaggtgcgtcaatcgataaacaggatcatgctgcgaatccttgtgggcaaattggcgagacggtcgatctcgatgaagccgtacaacgggcgctggaattcgctaaaaaggagggtaacacgctggtcatagtcaccgctgatcacgcccacgccagccagattgttgcgccggataccaaagctccgggcctcacccaggcgctaaataccaaagatggcgcagtgatggtgatgagttacgggaactccgaagaggattcacaagaacataccggcagtcagttgcgtattgcggcgtatggcccgcatgccgccaatgttgttggactgaccgaccagaccgatctcttctacaccatgaaagccgctctggggctgaaataaaaccgcgcccggcagtgaattttcgctgccgggtggtttttttgctgttagcaaccagacttaatggcagatcacgggcgcatacgctcatggttaaaacatgaagagggatggtgctatgaaaataacattactggttaccttgcttttcggtctggtttttttaaccaccgtcggcgctgccgagagaactttaaccccacaacaacagcgtatgacctcctgtaatcagcaggcgacggcgcaggcgttgaaaggggatgctcgtaagacctacatgagtgattgcctgaagaacagcaagtctgcgcctggcgaaaaaagtttgacgccacagcagcaaaagatgcgcgaatgcaataatcaagcaacacaacaatctctgaaaggtgatgatcgtaataagtttatgagtgcctgcctcaagaaagccgcctgatacctgatagtgctaacgggtgagctacgaaaatggctcacccgaaatatcatacttctgcctttagctccgtctctataatttgggaaaattgtttctgaatgttcccaaaaataatgaatgatgaaaactttttcaaaaaagcggcggcgcacggggaggaacctcctttaactcctcaaaacgaacatcagcggtccgggctgcgcttcgcccgtcgcgtcagactaccccgtgcggttggcctggctggcatgttcttaccgattgcttcaacgctggtttcacacccgccgccgggctggtggtggctggtgttggtcggctgggcgttcgtctggccgcatttagcctggcagatagcgagcagggccgtcgatccgcttagccgggaaatttacaacttaaaaaccgatgcagtattagcgggaatgtgggtaggcgtaatgggcgtaaacgtgctgccttccaccgcgatgttgatgattatgtgtctgaatttgatgggggcaggcggcccccgtctgtttgtcgcgggtctggtgttgatggtggtttcctgccttgtcaccctcgagctgacgggcattaccgtgtcgttcaatagtgcgccgctggaatggtggctctcccttcccattattgtcatttatcctctgctgtttggctgggtcagctaccagacggcaaccaaactggcggaacataaacgcaggttgcaggtcatgagtacccgcgacggcatgacgggcgtgtataaccgacgtcattgggaaactatgttacgcaatgaatttgataactgtcggcggcataatcgcgatgcaacgttactgattatcgatatcgaccatttcaagagcatcaacgatacctggggccatgatgtgggcgatgaagcgattgtggcgcttacccgacagttacaaattaccctgcgcggtagcgatgtgattggtcggtttggcggcgatgagtttgcagtaatcatgtccggtacgccagctgagagcgccattaccgccatgttacgggtgcatgaagggctaaatacattacgtttgccgaatacgccacaggtaactttacggattagtgtgggggttgcgccgctgaacccacaaatgagtcactatcgtgagtggttgaaatcggcagatttggcgctttacaaagcaaagaaagccggacgtaaccgcaccgaagtggcggcctgacgtccggcgaaagtcatcaggatttgctgagtttttctgatttttccatacacttcgtcatcgcttcgatcactgcagcacggaagcctttctcttccagtacgcgtaccgcttcaatggtggtgcctcccggtgagcagaccatatctttcagtgcccccggatgttctcccgtttccagcaccatttttgcggaacccattaccgcctgagcggcaaatttatacgcctgggcgcgtggcatcccgcccagcacggcggcgtcggccatcgcttcgataaacataaatacgtaggctggcgaagaaccgctcacaccgaccaccgggtggatcatcggctcagcaattacttccgcttcgccaaagcagcggaaaatattcagcacatcagcggtatcttctggggttaccagcgcgtttggcgttacggaggtcatcccggcattaaccagtgcgggagtgttcggcatggcgcggataattttccggtcatggcccagcgcgcgggcaagctggtcgagcgtgacacctgcagcaatagaaacgaccagagagtctttattcaggctggaggtgatttcgctaagcactttaatcatgatgccaggtttaacggcagcaaaaatgatgtcggcgatttgcgccacttcttgcgccgattctgcggcgttgatgccgaactggtcatgcagggcggcgactttatccggggagggggtgtatacccagatttgccctggaagcacctgaccgctggcaatcagaccgccgagaatggcttttcccatattgccgcagccaataaaaccgattttcttttccattgcctcactcctgccgtgaaattcattgttttgataatcgctggcagaagcataaacagaactatgccggaaggcaaaagcgcgacacaatagaggattacccaacaaaggatgactttatgacaatttgggtggatgccgacgcgtgtcccaatgtaattaaagagattttgtatcgcgcggcggaacgtatgcagatgccgctggtactggtagcaaaccagagtttacgcgtgccgccatcgcgatttattcgtacgctgcgcgtcgcggcaggtttcgacgttgccgataacgaaattgtccggcagtgtgaagcgggcgatttggtgatcaccgcagatatacctttggctgctgaagccatcgagaaaggcgctgcggcgcttaatccgcgcggcgaacgttacacgccagcgaccattcgtgagcgcctgacgatgcgcgattttatggataccttacgtgccagtgggatccagaccggcggaccagatagcctttcacaacgtgaccgccaggcctttgccgcggagctggagaagtggtggctggaagtgcaacgtagtcgtggctaaatgtaatttattatttacacttcattcttgaatatttattggtatagtaaggggtgtattgagattttcactttaagtggaattttttctttacaatcgaaattgtactagtttgatggtatgatcgctattctcatgacaccggctttcgccgcattgcgacctattggggaaaacccacgatgacacaacctctttttctgatcgggcctcggggctgtggtaaaacaacggtcggaatggcccttgccgattcgcttaaccgtcggtttgtcgataccgatcagtggttgcaatcacagctcaatatgacggtcgcggagatcgtcgaaagggaagagtgggcgggatttcgcgccagagaaacggcggcgctggaagcggtaactgcgccatccaccgttatcgctacaggcggcggcattattctgacggaatttaatcgtcacttcatgcaaaataacgggatcgtggtttatttgtgtgcgccagtatcagtcctggttaaccgactgcaagctgcaccggaagaagatttacggccaaccttaacgggaaaaccgctgagcgaagaagttcaggaagtgctggaagaacgcgatgcgctatatcgcgaagttgcgcatattatcatcgacgcaacaaacgaacccagccaggtgatttctgaaattcgcagcgccctggcacagacgatcaattgttgattttcgagcgcctatacttaacgttcatcccgtgaaataaggaagaacgatgccaacgaaaccgccttatcctcgtgaagcatatatagtgacgattgaaaaaggaaagccaggacagacggtaacctggtaccaactcagagccgatcatcctaaaccagactcgttgatcagtgaacatccgaccgctcaggaagcgatggatgcgaaaaaacgctatgaggaccctgacaaagagtgaccgcatcagactgctcggaagggattctgagtgccactacaagggatctgcgtcacatttttcataattcatgtttttctaataattagaatattaaacaataacaatccattactggaatcatttggaatctttacattatgccgtgcacgtctgctgctacgctttttgtcatttgtagcacaagtaagtgtcagcagtggtgcttcacacttgcccggtaattaacgacgaaagaaaagtaaggtggatgaacaatgagtgcgtcgttggcgatcctgaccatcggcattgtacctatgcaggaagttttgccgctcctgacggaatacattgacgaagataatatttcccatcatagcctgctggggaagttaagtcgtgaagaagtgatggcggagtacgcgccagaagcaggcgaagacaccattctcacattattaaatgacaaccagctggcccatgtttcgcgtcgcaaagtggagcgtgacctgcaaggtgtggttgaagtgctcgataatcagggttatgacgtcattttattaatgagtacagcaaacattagtagtatgactgcgcgtaatacgatctttcttgagccgtcgcgaatattgcctccactggtttcctctattgttgaagatcatcaggtgggggttatcgttccggttgaggagatgctgcccgttcaggcgcaaaaatggcaaattttgcagaaatcgccggtattttcattgggtaaccccattcatgattcagaacaaaaaatcattgatgccgggaaagaattactggcaaaaggggctgatgtcatcatgctggattgtttaggatttcaccaacgtcatcgcgatttactgcaaaaacagctcgatgttcctgtcttgctgtctaacgtattgattgcacggctggctgcggaattactggtgtaattttgcgtgacagccagcgcctctggcccctatagtgaagtagatgttcaactaccaaacagggccagtttatgcttcaaagtaatgagtacttttccggcaaagtgaaatcaatcggcttttccagcagcagcactggtcgcgccagcgtgggtgttatggttgaaggcgaatacaccttcagcaccgctgagccggaagagatgacggtaatcagtggcgcgctgaatgtgttactgcctgacgcgaccgactggcaggtgtatgaagccggttcggtgtttaatgttcccggtcacagtgagtttcatctgcaagttgccgaacccacctcttatctgtgccgctatctgtaattcctcgccttccccttgaacgggagggcatttttctgaaatatcctttctttagcccataataatatttcctttgctgcgattttttcaatttccgatatattcataatttatcaaggttgatataaatatcagtgaagatctccagatattgttgcggaactggctacgataaaagataaatcagatgatgaatggtggcgtgcattgctgcaaagtcgcaatgatcatttacgccaaacggcattgcgcaacgcacataccccggcgttgttgttaacgacattgactgagcctcaggatcggtcgctggctattaataatccacagctggctgccgatgtgaaaacggcgtggttaaaagaggatccatcattactcttatttgtcgaacaacccgatctttcgctgttacgtgatttagtgaaaaccggggcaacgcggaaaattcgcagtgaagcgcgtcaccggcttgaggaaaaacaatgacacaacgtccatggagcaagttacagcgtaaaacgcataatattgctgcgctaaaaattattgctcgccgtagcgaataattatatgcctggtgtggcttcgtacgccggataagacgcggcaggcgtcgcatccggcattaaaggaaaatcagcaattaacgttgtgcttcgccacctaatccttcaatcaggttttgaattaacgctgccagttcaccagtcatcaggatgaaatcggcatcaaaacgctgggcgaaatcttcacggtcgatatcttcgttttgatcgcgcagctcgtcgcagaacttcagacgcttgagcgaaccatcgtcgcacatcacaaactgaatgcgctgctgccagtcgagcgccagtttagtcaccacttttccggcttcaatgtgattggtgatctcttcgctggtcagatcttgtttcttcgcgcggatcacgccgccatcttccagcaacgatttcagctcggcttcatcaagcagctggaagccctgtgccgcactaccggagcgaacccattcggtcagcgtcagttcaatcgggttttccatgctcaatggtacaaccggtaacgaccccaggcttttacgcagtaatgccagcgtatcttccgcttttttggcactggcgcagtccaccataatcaaaccgttaaccgtgtcgatccacatcattgtctggctaaaacggctgaaagcacgcggcagcagagagtgcagcacttcgtctttcagcgaatctttttcggttttcttcagcttacgcgcctgttccgcttccagtttggcgattttcgcttccagcgcctgtttaatcaccggagacgggaggattttttcttctttgcgcgcgcagataacaatttgaccattggcaacgtgcgttaacgcatcgctgtgcgatcccatcggaggaacccagcccatcttcgccatgtcctggctgccgcatggggtaaatgccatcgaggctagctgtttttccatctcttctgcacgcagcgaaatctcgcggctaagacggtaaaccattaaatttttgaaccacagcatgataatttccacggccttgtcgttaaatttagcgggcatgataacgaattgtcggcggccttgcattgccaatccggttgtccgtctctacgctattgatattgaaaaaaataaggagagtaccgtgcgtataggtatcgatttaggcggcaccaaaactgaagtgattgcactgggcgatgcaggggagcagttgtaccgccatcgtctgcccacgccgcgtgatgattaccggcagactattgaaacgatcgccacgttggttgatatggcggagcaggcgacggggcagcgcggaacggtaggtatgggcattcctggctcaatttcgccttacaccggtgtggtgaagaatgccaattcaacctggctcaacggtcagccattcgataaagacttaagcgcgaggttgcagcgggaagtgcggctggcaaatgacgctaactgtctggcggtttcagaagcagtagatggcgcggcagcgggagcgcagacggtatttgccgtgattatcggcacgggatgcggcgcgggcgtggcattcaatgggcgggcgcatatcggcggcaatggcacggcaggtgagtggggacacaatccgctaccgtggatggacgaagacgaactgcgttatcgcgaggaagtcccttgttattgcggtaaacaaggttgtattgaaacctttatttcgggcacgggattcgcgatggattatcgtcgtttgagcggacatgcgctgaaaggcagtgaaattatccgcctggttgaagaaagcgatccggtagcggaactggcattgcgtcgctacgagctgcggctggcaaaatcgctggcacatgtcgtgaatattctcgatccggatgtgattgtcctggggggcgggatgagcaatgtagaccgtttatatcaaacggttgggcagttgattaaacaatttgtcttcggcggcgaatgtgaaacgccggtgcgtaaggcgaagcacggtgattccagcggcgtacgcggcgctgcgtggttatggccacaagagtaaaaaacgtaggcaattggcgcatcatgcctgatgcgacgcttgccgcgtcttatcaggcctacaaaaggtgccagaaccgtaggccggataaggcgttcacgccgcatccggcaataagtgctccgatgcctgatgcgacgcttgccgcgtcttatcaggcctgcaaaatgtgccagaaccgcgtagggcggataaggcgttcacgccgcatccggcaataagtaatgagcaccgagactataacctaccccagtggtttcgccagcaccggagtatccgccgcttgctggcgcttatagcgaccatacagcagcaacgacgacatcgcagcaaacgaaagcagggcggcaggcagcgccacgtaattatatgccagccccagcgtcagcatcatacctccgcaatatgcgccgacggcgctaccgaggttaaacgctatttgcccacctgcggcacctaataactctccgcctttggcgttttgtagtaacaatatttgtagcggtgctgaaagggcaaataatcccgcgcaacaaataaaagcaaaaataagcgacgttgttttcatgccgccgcagaaaaagagcatcagcagtgccagtacaattataaagtcagtcactgctgcaatgcgcagtggtgaataacgtcctgaaatcctgccacttagcatatttcccagcaccatccctagcccaactaacatcataataaaggtcatcgccgtttccgaaaaaccggaaataaacatcatgtatggctttacgtagctgaaccaggcaaacacacctgcgttgccaaacatcgtggcggcgaaaattaaccacggggccgggctgcgcaaaaagtgaaattgttcgcgcagatttcctttcgcctcgtcgcgaatatctggcacccaaaaatagaccgatgccatcaccgcaatattaaaaacagcgatcaataaaaaggtgtaacgccagctaaattcctgacttaaatacgttcccagcggaatgcccagcaaattggcgactgtcatcccggaaaccatccccgccacggcggcggtgacttttccgggtttgataatttttgataacacgatcgctccgacgccaaaaaatgcgccatgcggaaagccggataccagccgaccaatggcgagcatcaggtaagacgaagagagcgtgaacatggcgttgccaatgacgcacaacgccaccagaaacaacaagatatgtttgagtgagtagcggctggaaaagagtgcgatgattggcgcaccgaccaccacccccagtgcataatacgagatcatatgcccggcggcaggaatcgaaattcctacgttatgcgccagctccgtgagcacgcccataatgccaaattcggccatccccaaaccaaacgtgcccagagccaaagataaaatgacttttttcataccaccatcacaaccaccagaacggctaccaatcaccgtagccaataaagtgatagcttgcaggataacgaccagcaaggccaagagataattcgcccctctgtattcattatcctgctgaatagttatttcactgcaaacgtactttccagtttgctgtagcccaggccgttgatctttttcactttgatctgcaccggaatacgctctttcatcgcttctacgtggctaatcacaccgatggttttgccactggcgttcagggcatccagcgcatcaagggcggtatccagcgtttcgctatccagcgtgccaaaaccttcatcaaggaacagcgagtcaatacgtgttttatggctgaccagatccgaaagcgccagcgccagcgccagactaacgaggaaactttcgccgccggaaagggtacgggtatcgcgtaccgcatctgcctgccaggtatcaacaacctcgacttccagcgcctcgctggctttgcgctgtaacagatagcgcccgtgcagccgggtaagttgctgattagcgagatggactaaattatccagcgtcagcccctgggcaaacttgcggaatttatcgccctctttggaacctattagcgaattcagatatccccagtcctcaacctgctgcgtcatttgagcaatttgctgcattaaggtttgttgttgctgacggttatctgcatcctgcttcagctgctggcgaatctcgccttgactcgtggtgttttcacgcaacttttggtgagtttgcgctaactcttgctgaatctgctccaccgtcacagtgagagccaacccgtcgtcaggtcggtgttgttgatgctgtgccagcgtttctgctgtctgagtgaccagagtttgcgcctgacggcgctggttttccagattctgcttgagctgttccagctgcgttagtgtttgttcatccattagcgccgcaaggaacgcctgctgatcgtcaaagacgctggcctgtagcgcggtgtcaaactgcgcctgggctttttgcagactttgcgccgccagaacatcctgttgctgtaacgtctgctgctggctgtgtaatgcgagacattgttcatgtacctgccgccagttttccaataccacagtttcttcgcagtgcgggagttcatcactttgcggcaacgtttccagaatcggcgtcagctgctgaatacggttttgcagcgcggttaattcgttctggcgttgctgccagctctgcgcttcttgctgacgtgtcgccaaccagctctcttcttcatcttcctgtggcaatgtcagtgcataacccgtcaatgtcgttaaaagtagttgctggcgttgttcaatttgctgttgatactggataatttgctgattatgcgcggcaatctgcccttgtaattcatgccgttggctgagtaaccgcagctggcgttcgtgctcatcttgtgcatccagccacggttgaatatcgtccagtggctgcaaggtgatattgaggctggccgtgacggcttgccattgttgagtaagtgcttgctcatcttgtcggaggctttgcgcttcgttttcatcacgctgaagctgctttgttatggcgtccagttgcccacgtagcgtcgcaccttcttcaccgagctttttaacttcgttttccagcgccagtaatcgagactgattaacgccaggctccagcgcctgatacgcctcgaccgccgggtggctggtggaaccacaaagtgggcaaggctgacccgcctgtaactgtgcacgttgagcttccagcgttttgatgcgcgcttcctgctcgcaaatggttttcacatcggcaagttgctgcgtcttttctttataacgctggcgcatttcgttaagtgcggcgttacgttgcgtctgttcttgcgtgacattctggatagcgacctgtaactgcgccagacgtttttgttggggaacaatctgtccatgcagcgcgaccaggtgctgacgcagtgggcgttgctcagcatgttgcgccagggcggtagcaacttcatcggcggttaacgtcaacgtgatcgccgcaagcgcattaagtttttgctcagcatgggttaactgttgctgccattgccgcagatgctcgcgatcgctggtttgttgggagaactgcgcacgccaacccgccggttcgttgttccactgacggaagcggtcgtgttcctgtaaccaggtattcaggctttgttgctgctgctgtaattctgctgactgcttcgccgcgtggtggcgaatgctcgcgcgaagcgccattgtgctctgtaagcgagtatttacttcttcaatctgctggcgaatatgcgccagcgccgcgctgtgttctgcgatgcgttcccagtgtggacgaagatttcgtgccggttgtgccagactaagcgccgccagttgaggttgcgctttttcttcttcggctaacgcctgttgcaaggcctgctgacggcggctggcttcttgctgcaattcgtcctgacgcgttaaccagtttagcgattgttgttcttgctgctgcgcggtaattaactgtttttcttcgtcagtaagtacctgcaaactcgctgtcagcgattgcacttgttccggcgtgagcaacgtgacgccgctggcctgcgcttgcagcttctccagctctgtgcgggccgatttgtgctgctcaaaaaccatcgccgagatttgcccgtagatttcagtgccggttaactcctcgagcaattccgcgcgttctttgggtttggcattcaggaaggcagcaaattgcccctgcgaaagcagcatcgaacgggtgaagcgcccgtaatccagcccggttaacgtcgctgtcagttccagcttatctttcactttgtcggcgagaattttgccgtcggcgcagcgcgccagctctacgcgtggcacctgcaaattaccgtcgggttggttacgcgcccgattctggctccagaatgcacggtacgcttcacctttcacttcaaactccacctccgccagacattcggcggtatcgcgggtcatgagatcattttgcgattgtgaaacgttagagagacgcggagtttcgtgatacagcgccagacaaatggcgtccagcagggtggttttccccgcacctgttgggccggtaatagcaaacagcccgttgctggcgaacggctcgcgggtgaaatcaatcttccattcgccttttaatgagttcaggtttttcaggcgcaggctgagaattttcatgcttcgtgttctccggcgagggtatgcaacgtcgtggtgaaaagatgctgcagacgttgctgctgcgattcatccagttcttccagtgccagacggcgattgaacacctcttcgacgctgagttcgctgagggtttcacgctgttggctggctaacacacgctcgcgctgttcacgactccgacgtaccagcaatacttcgacaggcaatgattcggttaatgcctggattttgcgctgaatatcatgcagatactcatcagtagtgatttcgatatccagccagacaggtggctcctgcgatacatcgcgccactgttccagctgtgcggtaatcgacgccagatcgcctttcagcactgccatgggttgcgttaccggtacgttcaggttttccacgctctctaatttgccgtttgaaaatgtcaccagatggacatatttactcttaccgcattcatcaaaactcagtggaatgggggagccgcaatagcgaacatgttccatgccgccaataatctgtgcgcggtgaatatgcccgagcgcgatgtagtcggctggtggaaagttttgtgccggaaacgcgtccagcgtgccaatataaatgtcacgcacggcgtcacttttactggcccccacggtcgttaaatgtcccgtggcgatgatgggcagaggctgatcgccgcgcagtttgcaggcatcggcatagtgttgttggtaataatcggtaatcgctgccagtaaatgctgctgtttttcaataccgttaagccccgcctggctggtaataatgtcacgcggacgtaaaaacggaatggggcacagcactgcgcctggcgtcccgtcgcgacgaggcaagatttgcggcgcatgtccggcgctggcgaccacggtagtattgaggaacgccatgatatcgcgcgattcattcagcgtggcgaccgagtcatggtttcctgccagtaccaccagatgacagccagtttgctgtaaattgacaacaaaacggttgtataacgtgcgggcgtaactgggcggcgagccggtatcgaaaacatcaccggcaacaataatcgcatccacctgatgggtttgtgctgtctccagcagccagtcaagaaaagcctgatgttcagcttcgcggcttttactgtagaagttctggccgagatgccagtctgaggtgtgaaggatgcgcataacggttccctggcgaaaaagcatgggcgcgattatacccaaacagatgtgccatttgcttttttctgcgccacggaaatcaataacctgaagatatgtgcgacgagcttttcataaatctgtcataaatctgacgcataatgacgtcgcattaatgatcgcaacctatttattacaacagggcaaatcatggcgagacgtattctggtcgtagaagatgaagctccaattcgcgaaatggtctgcttcgtgctcgaacaaaatggctttcagccggtcgaagcggaagattatgacagtgctgtgaatcaactgaatgaaccctggccggatttaattctcctcgactggatgttacctggcggctccggtatccagttcatcaaacacctcaagcgcgagtcgatgacccgggatattccagtggtgatgttgaccgccagaggggaagaagaagatcgcgtgcgcggccttgaaaccggcgcggatgactatatcaccaagccgttttcgccgaaggagctggtggcgcgaatcaaagcggtaatgcgccgtatttcgccaatggcggtggaagaggtgattgagatgcagggattaagtctcgacccgacatctcaccgagtgatggcgggcgaagagccgctggagatggggccgacagaatttaaactgctgcacttttttatgacgcatcctgagcgcgtgtacagccgcgagcagctgttaaaccacgtctggggaactaacgtgtatgtggaagaccgcacggtcgatgtccacattcgtcgcctgcgtaaagcactggagcccggcgggcatgaccgcatggtgcagaccgtgcgcggtacaggatatcgtttttcaacccgcttttaacgccttgctcatcggacgcagagcagggcttatgatttcttaactggagtatcttacgtgctggaacggctgtcgtggaaaaggctggtgctggagctgctactttgctgcctcccggctttcatcctgggtgcattttttggttacctgccctggtttttgctggcatcggtaacaggactgcttatctggcatttctggaatttattgcgcctttcatggtggctgtgggtggatcgcagtatgaccccgccaccggggcgtggtagctgggaaccgctactatacggcttacaccagatgcagctgcgaaataaaaaacgccgccgtgaactgggcaatctgattaaacgctttcgtagcggcgcggagtcgctgcccgacgcggtggtgctgaccacggaagagggcggtattttctggtgtaacggtctggcgcaacaaattcttggtttgcgctggccggaagataacgggcagaacatccttaacctactgcgttacccggagtttacgcaatatctgaaaacgcgtgatttttctcgcccgctcaatctggtgctcaacaccgggcggcatctggaaattcgcgtcatgccttatacccacaaacagttgctgatggtggcgcgtgatgtcacgcaaatgcatcaactggaaggggcgcggcgtaacttttttgccaacgtgagccatgagttacgtacgccattgaccgtgttacagggttacctggagatgatgaatgagcagccgctggaaggcgcggtacgcgaaaaagcgttgcacaccatgcgcgagcagacccagcggatggaaggactggtgaagcaattgctgacgctgtcgaaaatagaagccgcaccgacgcatttgctcaatgaaaaggttgatgtgccgatgatgctgcgcgttgttgagcgcgaggctcagactctgagtcagaaaaaacagacatttacctttgagatagataacggcctcaaggtgtctggcaacgaagatcagctacgcagtgcgatttcgaacctggtctataacgccgtgaatcatacgccggaaggcacgcatatcaccgtacgctggcagcgagtgccgcacggtgccgaatttagcgttgaagataacggaccgggcattgcaccggagcatattccgcgcctgaccgagcgtttttatcgcgttgataaagcgcgttcccggcaaaccggcggtagcggattagggttagcgatcgtgaaacatgctgtgaatcatcacgaaagtcgcctgaatattgagagtacagtaggaaaaggaacacgtttcagttttgttatcccggaacgtttaattgccaaaaacagcgattaatccgcctttgtcatcttttattgccataagccagtcgatgctggcttattttctttgcagtcaaaatacgggcgttagattttacaacgattggtgattttttgttcgcatgattagccatgtctttttcacggaaatagtgttttatactggttggtgatttcttatcgctatatacctctggtttttagatccctccttgctttaaaacgttataagcgtttaaattgcgcttcaggtgctgtcatactgactgcattaacgcggtaaatcgaaaaactattcttcgccgcgcctggttgggagtatttcccgctaaaattgtttaaatataccgctgtatcatccccagggattggcacaaaaatttaacgttacaacaccacatccacaggcagtatgatttatgacccatcaattaagatcgcgcgatatcatcgctctgggctttatgacatttgcgttgttcgtcggcgcaggtaacattattttccctccaatggtcggcttacaggcaggcgaacacgtctggactgcggcattcggcttcctcattactgccgttggcctgccggtattaacggtagtggcgctggcaaaagttggcggcggtgttgacagcctcagcacgccaatcggtaaagtcgctggcgtactgctggcaacggtttgttacctggcggtggggccgcttttcgctacgccgcgtacagctaccgtttcctttgaagtggggattgcgccgctgacgggtgattccgcgctgccgctgtttatctacagcctggtctatttcgctatcgttattctggtttcgctctatccgggcaagctgctggataccgtgggcaacttccttgcgccgctgaaaattatcgcgctggtcatcctgtctgttgccgctattgtctggccggcgggttctatcagcacggcgactgaggcttatcaaaacgctgcgttttctaacggcttcgttaacggctatctgaccatggatacgctgggcgcaatggtgtttggtatcgttattgttaacgcggcgcgttctcgtggcgttaccgaagcgcgtctgctgacccgttataccgtctgggctggcctgatggcgggtgttggtctgactctgctgtacctggcgctgttccgtctggggtcagacagcgcgtcgctggtcgatcagtctgcaaacggcgctgctattctgcatgcttacgttcagcacacctttggcggcggcggtagcttcctgctggcggcgttaatcttcatcgcctgcctggtaacggcagttggcctgacctgtgcttgtgcagaattctttgcccagtacgtaccgctctcttatcgtacgctggtgtttatcctcggcggcttctcgatggtggtttctaacctcggcttaagccagctgatccagatctccgtaccggtgctgaccgctatttatccgccgtgtatcgcactggttgtattaagttttacacgctcatggtggcataattcgtcccgcgtgattgctccgccgatgtttatcagcctgctttttggtattctcgacgggatcaaagcatctgcattcagcgatatcttaccgtcctgggcgcagcgtttaccgctggccgaacaaggtctggcgtggttaatgccaacagtggtgatggtggttctggccattatctgggatcgcgcggcaggtcgtcaggtgacctccagcgctcactaaatcactgaacatttgttttaaccacggggctgcgatgccccgtggttttttattgtgttgatgggttaggaattgatggaaagtaagaacaagctaaagcgtgggctaagtacccgccacatacgctttatggcactgggttcagcaattggcaccgggctgttttacggttcggcagacgccatcaaaatggccggtccgagcgtgttgttggcctatattatcggtggtatcgcggcgtatatcattatgcgtgcgctgggggaaatgtcggtacataacccggccgccagctctttctcgcgttatgcgcaggaaaacctcggcccgctggcaggttacattaccggctggacctactgctttgaaatccttattgtcgccatcgccgatgtgaccgcttttggtatctatatgggtgtctggttcccgacggtgccgcactggatttgggtactgagcgtggtgctgatcatttgcgccgtaaacctgatgagcgtgaaggtattcggtgagctggaattctggttctcgttctttaaagtcgccaccatcatcatcatgattgtcgccggtttcggcatcatcatctgggggattggcaacggcgggcaaccgaccggtattcataacctgtggagcaacggcggcttcttcagtaacggctggcttggcatggtaatgtcgttgcaaatggtgatgtttgcttacggtgggatcgaaattatcgggattaccgccggtgaagcgaaagatcctgagaaatcgataccgcgtgcgattaactccgtgccgatgcgtattctggtgttctacgtcggtacgctgttcgtcattatgtctatctacccgtggaatcaggttggcactgccggtagcccgttcgtgctgacgttccagcatatgggcattacctttgccgccagcattcttaactttgttgtgctgactgcttcgctgtcggcaattaacagtgatgtatttggcgtaggccgtatgctccacggtatggcagagcagggcagcgcgccgaaaattttcagcaaaacgtcgcgtcgcggtattccgtgggttacggtgctggtgatgactaccgcgctgctgtttgcggtgtatctgaactacatcatgccggaaaacgtcttcctggtgatcgcttcgctggcaaccttcgccacggtgtgggtgtggattatgatcctgctgtcgcaaattgccttccgtcgccgtttgccgccagaagaagttaaggcgctgaaatttaaagtgccgggtggggtagcaacgaccatcggcgggctgattttcctgctctttattatcgggttgattggttatcacccggatacgcgtatctcgctgtatgtcggtttcgcgtggattgttgtgctgttgattggctggatgtttaaacgccgccacgatcgtcagctggctgaaaaccagtaatccttgcgttctgtaagccggttcaggaggaaatcctgatccggctattccgaaagttatccgcccccgtcctcctcccccaaatatccttcagatgatgagtgatcctgcattaggctatggcaaggtgatcagattttcatcacaggggaattatgatgttaaatgcatggcacctgccggtgcccccatttgttaaacaaagcaaagatcaactgctcattacactgtggctgacgggcgaagacccaccgcagcgcattatgctgcgtacagaacacgataacgaagaaatgtcagtaccgatgcataagcagcgcagtcagccgcagcctggcgtcaccgcatggcgtgcggcgattgatctctccagcggacaaccccggcggcgttacagtttcaaactgctgtggcacgatcgccagcgttggtttacaccgcagggcttcagccgaatgccgccggcacgactggagcagtttgccgtcgatgtaccggatatcggcccacaatgggctgcggatcagattttttatcagatcttccctgatcgttttgcgcgtagtcttcctcgtgaagctgaacaggatcatgtctattaccatcatgcagccggacaagagatcatcttgcgtgactgggatgaaccggtcacggcgcaggcgggcggatcaacgttctatggcggcgatctggacgggataagcgaaaaactgccgtatctgaaaaagcttggcgtgacagcgctgtatctcaatccggtgtttaaagctcccagcgtacataaatacgataccgaggattatcgccatgtcgatccgcagtttggcggtgatggggcgttgctgcgtttgcgacacaatacgcagcagctgggaatgcggctggtgctggacggcgtgtttaaccacagtggcgattcccatgcctggtttgacaggcataatcgtggcacgggtggtgcttgtcacaaccccgaatcgccctggcgcgactggtactcgtttagtgatgatggcacggcgctcgactggcttggctatgccagcttgccgaagctggattatcagtcggaaagtctggtgaatgaaatttatcgcggggaagacagtattgtccgccactggctgaaagcgccgtggaatatggacggctggcggctggatgtggtgcatatgctgggggaggcgggtggggcgcgcaataatatgcagcacgttgccgggatcaccgaagcggcgaaagaaacccagccggaagcgtatattgtcggcgaacattttggcgatgcacggcaatggttacaggccgatgtggaagatgccgccatgaactatcgtggcttcacattcccgttgtggggatttcttgccaataccgatatctcttacgatccgcagcaaattgatgcccaaacctgtatggcctggatggataattaccgcgcagggctttctcatcaacaacaattacgtatgtttaatcagctcgacagccacgatactgcgcgatttaaaacgctgctcggtcgggatattgcgcgcctgccgctggcggtggtctggctgttcacctggcctggtgtaccgtgcatttattacggtgatgaagtaggactggatggcaaaaacgatccgttttgccgtaaaccgttcccctggcaggtggaaaagcaggatacggcgttattcgcgctgtaccagcgaatgattgcgctgcgtaagaaaagtcaggcgctacgtcatggcggctgtcaggtgctgtatgcggaagataacgtggtggtatttgtccgcgtgctgaatcagcaacgtgtactggtggcaatcaaccgtggcgaggcctgtgaagtggtgctacccgcgtcaccgtttctcaatgccgtgcaatggcaatgcaaagaagggcatgggcaactgactgacgggattctggctttgcctgccatttcggctacggtatggatgaactaacgttttataacgccttgcgtgacgcctgcgccatcatccgcggataaaactgccagaagcgggtttcgagggcgtcataatgagcgtctaaatcgtaccaggagtcacgcagggcatccagacgtgggcggcggcttgccatgccgtttaacacgttctggatgaaatccatatcgcgatagcgcaccagccactgctctgaccacaagtaattgttcagattgataaaacgtggcggtgagtccggcaaaatcgtcatcacttgctcgcgggcataacagacaaattcctgtagcggaaagtccggcgacagctgcgaccagtggcgggaaagaaagtgatcccacatgacatccagcgtaataggcgcaacgcggcgcgtttcactacgaaaccactcccgtgcttcgcggacttccggcagattgtcagtcaatacgtcgatacgtcgatgcatatgaatgccagccacgacgtcgggcggaaaactttcttcaggatttccgcgtacgaaatcagccagtaaattgccggaaagcgagctttccgcgagatgggctaaatgcaggtgagctaaaaaattcatcgattatattctatccaaaagggggtaaaggttgcagggagagcgccccggcactagactacccgcctcttattttagtctgagtcagtgtcatgcgcgttaccgatttctcctttgaattgcccgaatccctgattgcccactatcccatgcctgaacgcagtagctgtcgtttactgtcgctggacgggccgacgggcgcgctgacgcacggtactttcaccgatttacttgataagctcaaccccggcgatcttctggtttttaataatacccgcgtgatcccggcgcgcctgtttgggcgtaaagccagcggcggcaagattgaagtgctggttgaacggatgctcgacgacaaacgcattcttgcgcatattcgcgcctcgaaagcgccaaaacctggcgcagaactgctgctgggcgatgacgaaagtattaacgcaacaatgaccgcgcgccacggcgcactgtttgaagtcgaatttaatgatgaacgctcggtgctggatattctcaacagcatcggccatatgccgctgccgccgtatatcgaccgtccggacgaagacgctgaccgcgaactttatcaaaccgtttatagcgaaaaaccgggcgcggttgcagccccgaccgcaggtctgcattttgacgagcctttgctggaaaaattgcgcgccaaaggcgtggagatggcgtttgtgacgttgcacgttggtgcgggcaccttccagccggtgcgcgtcgacaccattgaagatcacatcatgcactcggaatacgctgaagtaccgcaggatgtggtagacgcggtactggcggcgaaagcgcgcggtaaccgggtgattgcggttggcaccacttcagtacgttcgctggaaagcgcggctcaggcagcgaaaaacgatctcattgaaccgttcttcgacgatacccaaatctttatctatccgggcttccagtacaaagtggtcgatgcgctggtgacgaacttccacttgccagagtcgacgctgattatgctggtttcggcctttgccggttatcaacacaccatgaacgcctataaagcagcggtagaagagaaatatcgcttttttagttacggtgatgcgatgtttatcacgtacaatccgcaggcaattaatgagcgcgtcggggagtaattccgcggcgctggtttaaaacgttggactgtttttctgacgtagtggagaaaaaatgaaatttgaactggacaccaccgacggtcgcgcacgccgtggccgcctggtctttgatcgtggcgtagtggaaacgccttgttttatgcctgttggcacctacggcaccgtaaaagggatgacgccggaagaagttgaagccactggcgcgcaaattatcctcggcaacaccttccacctgtggctgcgcccgggccaggaaatcatgaaactgcacggcgatctgcacgattttatgcagtggaaggggccgatcctcaccgactccggcggcttccaggtcttcagccttggcgatattcgtaaaatcaccgaacagggcgtgcacttccgtaacccgatcaacggcgatccgattttcctcgatcctgaaaaatcaatggagattcagtacgatcttggttcggatatcgtcatgatctttgatgagtgtacgccgtatcctgctgactgggattacgcaaaacgctccatggagatgtctctgcgttgggcgaagcgtagccgtgagcgttttgacagtctcggaaacaaaaatgcgctgtttggtatcatccagggcagcgtttacgaagatttacgtgatatttctgttaaaggtctggtagatatcggttttgatggctacgctgtcggcggtctggctgtgggtgagccgaaagcagatatgcaccgcattctggagcatgtatgcccgcaaattccggcagacaaaccgcgttacctgatgggcgttggtaaaccagaagacctggttgaaggcgtacgtcgtggtatcgatatgtttgactgcgtaatgccaacccgcaacgcccgaaatggtcatttgttcgtgaccgatggcgtggtgaaaatccgcaatgcgaagtataagagcgatactggcccactcgatcctgagtgtgattgctacacctgtcgcaattattcacgcgcttacttgcatcatcttgaccgttgcaacgaaatattaggcgcgcgactcaacaccattcataaccttcgttactaccagcgtttgatggcgggtttacgcaaggctattgaagagggtaaattagagagcttcgtaactgatttttaccagcgtcaggggcgagaagtaccacctttgaacgttgattaatattaataatgagggaaatttaatgagcttttttatttctgatgcggtagcggcaacgggtgcaccggcgcaaggtagcccgatgtctttgattttgatgctggtggtattcggtctgattttctatttcatgatcctgcgtccacagcagaagcgcaccaaagaacacaaaaagctgatggactccattgccaaaggtgatgaagttctgacgaacggtggcctggttggtcgcgtaaccaaagtagcggaaaacggctacattgctatcgcgctgaatgacaccactgaagtagttattaaacgtgacttcgtagctgccgtcctgccgaaaggcaccatgaaggcgctgtaattaaaatttttccctaagggaattgccgtgttaaaccgttatcctttgtggaagtacgtcatgctgatcgtggtgattgtcatcggtctgctgtatgcgcttcccaacctgtttggtgaggatccggctgttcagatcactggtgcgcgcggagtcgccgccagtgagcaaacgctgatccaggtccagaaaacgttacaagaagaaaaaataactgctaagtctgtggcactggaagagggcgctattcttgcgcgcttcgactccactgacacccagttgcgcgctcgtgaagcattaatgggcgttatgggtgacaaatacgtcgtggcgcttaaccttgccccggcaacgccgcgctggctggcagctattcacgctgagccgatgaagctcggccttgacctgcgtggcggcgttcacttcctgatggaagtggatatggacaccgcgcttggcaaactccaggaacaaaatatcgatagcctacgcagtgacctgcgcgaaaagggcatcccgtataccactgttcgtaaagaaaacaactacggcctgagcatcactttccgcgatgctaaagctcgtgatgaagccattgcgtatctgagcaagcgccatccggacctggtgattagcagccagggcagcaaccagctgcgtgcggtaatgagcgatgctcgtctgagtgaagcgcgtgaatatgcggtgcagcagaacattaatatcctgcgtaaccgtgtaaaccaacttggcgtggcggagccggtggttcagcgtcagggtgctgaccgtatcgttgttgaactgccaggtattcaggacactgcgcgtgcgaaagagattctgggtgcgacggcaacgctggaattccgtctggtaaacaccaacgttgaccaggccgctgcggcatccggtcgcgtaccgggcgactctgaagtgaaacagacccgcgaaggtcagccagttgtgctgtacaaacgcgtaattctgaccggtgaccatatcaccgactccacttccagccaggacgaatacaaccaaccgcaggttaacatctcgctcgatagcgctggtggtaacatcatgtctaacttcactaaggacaacatcggcaaaccgatggcaaccctgtttgtggagtacaaagacagcggtaagaaagatgcaaatggtcgtgcggttctggtgaaacaggaagaggtgattaacatcgccaacatccagtctcgtctgggtaacagcttccgtatcaccggcatcaacaacccgaacgaagcccgtcagctgtcactgctgctgcgtgccggtgcgttgatcgcgccgattcagattgttgaagaacgtaccattggcccaaccctgggtatgcagaacattgaacaggggctggaggcttgccttgccggtctgctggtttctattctgttcatgatcatcttctataagaagtttggtctgattgcgaccagtgctctgattgccaacttgatcttaatcgtcggcattatgtcgctgttgccaggcgcaacgctgagtatgccaggtatcgcgggtatcgtcttaacccttgcggtggcggtcgatgcgaacgtactgatcaacgaacgtattaaagaagagttgagcaacggacgtactgttcaacaggcaattgatgaaggttatcgtggcgcattcagttctatcttcgatgcgaacatcaccacgctgattaaagtcatcatcctgtacgcagtgggtaccggggcaattaaagggttcgcgattactaccggtatcggtgtggcgacgtcgatgtttaccgcgattgtcggtacgcgtgccatcgtaaacctgctatatggcggcaagcgcgtcaagaagctgtcaatctgaggagtgcgatgtggcacaggaatatactgttgaacaactaaaccacggccgtaaagtctatgactttatgcgctgggactactgggctttcggcatctctggtctgctgttaatcgctgctatcgttattatgggcgtgcgcggctttaactgggggctggatttcaccggtggtacggttattgaaattacgctcgaaaaaccggctgaaattgacgtaatgcgtgatgcattgcaaaaagccggttttgaagagccgatgctgcaaaactttggtagcagccatgacatcatggtccgtatgccgcctgctgaaggcgaaaccggcggtcaggtgttgggcagccaggttctgaaggtgattaacgaatccaccaatcagaatgcagcagtgaagcgtattgagttcgtcggtccgagcgtgggggcagaccttgcgcaaaccggtgcgatggcgttgatggcagcgctgctgtctatcctcgtgtacgtaggtttccgctttgagtggcgactggcggcaggggtggttattgcgctggcgcacgacgttatcattacgctgggtattttgtcgttattccatatcgagattgacctgaccattgtggcatcgttgatgtcggttatcggttactcgcttaacgacagtatcgtggtatcggaccgtattcgtgaaaacttccgcaagatccgtcgcggtacgccttacgaaatctttaacgtgtccttgacccagacgctgcaccgtaccttgatcacatccggtactaccttgatggttatcctgatgctgtacctcttcggtggtccggtactggaaggcttctcgctgaccatgcttatcggtgtttccatcggtactgcatcttccatctatgtggcatctgcgttggctctgaaactgggtatgaagcgcgaacacatgttgcagcagaaagtggaaaaagaaggggcggatcagccgtcaattctgccgtaatcaagttcccgttgatgttgaaaatcccggtcagaagatcgggattttttttgatgtatggagattgcgaaaatccccgcatcttgggaaactgcgcgtaaccctacatttcatccaggtaacttttcatggctatcatcccaaaaaactatgcgcggttagaaagcggctatcgcgaaaaagcattaaaaatctatccgtgggtctgcggtcgctgttcccgcgagtttgtttattccaacctgcgtgaacttaccgttcaccacattgatcacgaccataccaataacccggaagatggcagtaactgggaattgttgtgtctctattgccacgatcatgagcattcgaaatataccgaagcggatcagtatggtacgaccgttatcgcaggggaagatgcgcagaaagatgtcggtgaagcgaagtacaacccattcgctgacctgaaagcgatgatgaacaagaagaagtgattaaaacgtaaaattgcctgatgcgctacgcttatcaggcctacgttatttcagcaatatattgaatttacgtgcttttgttggccggacaaagcgtttacgccgcatccggcatgaacaaagcacacgttgttaacaatcagaaatgccgggaataaatcccggcattttcataatcagaagttgtaacctactaccaggtaaccaccccagccggtagagcgaacgttgaagttgccgttgccgaagttcagttctgcatcgtcgttccactgaccaccgtcgtgccagtaacgagctacgacagagtagtgccagtgatcgtagttcagagccagaatatggctggaagcgatagagttattagtacgggtcttaataccgttgattgcgttaccgctgtcatcccctaaatcggaaccccagtcgaagttggtgaagccgatgtagctcagctgaccgccccacagatcggtaatcggcacaaagtatttaattttgaaacggtaaccgtcccactcgttttcgttcgctgcgccatagttctgccactggtatttcgcatagacgttcatggacaggctcatcggcaggccagtgtcgatatcggtacccagacccatgtaccaggtgctctggcgaccatctttattacgacccatgtcgtaaatgtagttgttcgcgaagtaccactctttgaacggaccgaagctaaggtcagtattggtcagcttgtcgatggagaaacgtggttcgatttccataaacagcggagaaccgtggttccagatacctttagcatcggagttaccgccgaagaataccggcgcatccgcataaccatagaagtcgaaccagtcttttttagcgaatgcttcgtactcaaggtaggtatcgttgcggatctgcggtccgaaacgggtgtgatagcttccgacaacgttaacgctctggtgccaccagtcggaaagatactgcggtttgtcgttttcagctgcgttgacagtaaaagacgaagagagcgccagtaccgcaccggctgccagtaatgtttttttcatatgtatgccactgtttgaaaatcccttgcgggagtgaaaaaggcgcaaattgcgtttctaaatatttcgtatacagaggagcctattataaaaatcattgctcacaaaaatatgtttcgtttcacagttctatcatttacgtaatcgattgcgttcacgtttacacacattcgggcggggattgtactgactttcgcccttgttgcaaacttttactatcaatccaggtgatgtaagcagagtaacaaaatgacggggaaagatgttgcgggacgcacaaaatcgtcccgaaatacgtttactgcataacaggttgaatgtcgtggatacgtacaaagcctaactgatccacagaaatcccctttaactgtaacggaatatcaacatcgctgggggcgaggacgctggcaggggcattaatcaattgattctgcacattgatttcctgaaagttgtctattgttccctgaatttgcccatattcaacagttccgctgaatgcgggcaagggatcattcgactcaccctgaatacgtagtgtaagggtggtgccatctgcatcaggcgtaatattcaccagcgacatacgtaaagtaccgatctggctttccagtcttgccggtgttttcgctccaggcagaaggtaaaccccactgctggattttgcattcagcctgttttgctgagtgattttgactgtttcttgattgagttgcgtcatctcctggttcagcgtgctgacgctgtgtttcatctgtcgcacttcactttgctgcacacaggcgctaaggctgaacaggcttcccagcaggagcagtcgaaaaacgttagtattcataggtcgtccctttctcgtcgcaattagcctaatggtagagggtaaaagcagcgaaagcatcgatcctttatctcaaaagcgttgcgcctttgttgtatcgtcagttcagggtaaaatagatttccgttaaccacctggtcaggacgccgtatgcattgcccattctgtttcgccgtggacactaaggtaattgactctcgtctcgtgggcgagggttcatccgtacgccgccgtcggcagtgtctggtgtgtaatgaacgtttcaccacctttgaagtggcggagctggttatgccgcgtgttgtaaaaagcaacgacgtgcgtgaaccgtttaatgaagagaaattgcgtagcggaatgctgcgggcgctggaaaaacgtccggtgagttccgatgacgtcgaaatggcaatcaatcatattaaatcgcagctgcgcgccaccggtgagcgcgaagtgccgagcaagatgattggcaatctggtgatggagcaattgaaaaagctcgataaagtcgcctatatccgttttgcctctgtctaccgcagtttcgaagatatcaaagaatttggcgaagagatcgcgcgcctggaggactaagccgtgcaggacgagtattacatggcgcgggcgctaaagctggcgcaacgaggacgttttaccacgcatcccaacccgaatgtcgggtgcgtcattgtcaaagatggcgaaattgtcggtgaaggttaccaccaacgtgcgggtgaaccacatgccgaagtacacgcgttgcgtatggcgggtgaaaaagccaaaggtgcgaccgcctatgtcacactcgaaccctgtagccatcatggtcgtacgccaccgtgctgtgacgcactcatcgccgctggcgtagcgcgcgtggttgcctcgatgcaagatcctaacccgcaggtcgctgggcgtggactttaccgtctgcaacaggctggcattgacgtcagccacggcctgatgatgagtgaagccgagcaattgaataaaggctttctcaagcggatgcgcaccggctttccttatattcagttaaaacttggcgcatcgcttgatggtcgcacggcgatggcgagcggcgaaagccagtggatcacttcgccccaggcgcggcgtgatgtacaactactgcgcgcgcaaagtcatgccattttaaccagcagcgccacggtgctggcggatgatcctgccttaacggtgcgttggtctgaactggatgaacaaactcaggcgctctatccgcaacaaaatctccgtcagccgatacgtattgtgattgatagccaaaatcgcgtgacgccggtacatcgcattgtgcagcagcccggcgaaacctggttcgcgcgtacgcaggaagattctcgtgagtggccggaaacggtgcgtaccttgctgattccagagcataaaggtcatctggatctggttgtactgatgatgcaactgggtaaacagcaaattaacagcatctgggtggaagcggggccaacgctcgctggcgcattgctgcaggcgggtttagtcgatgagctgattgtctatatcgcacctaaactattaggcagcgacgcccgcggattatgcacgctgccagggcttgagaaattagccgacgccccccaatttaaattcaaagagatacgtcatgtaggcccggatgtttgcctgcatttagtgggtgcatgatctcccggctcgaaagggaagcagcgcacgaaatattatgctaaaatccgcccccctgcggggccatactcgaacccgaaggaagaaaatgaacattattgaagctaacgttgctaccccggacgctcgcgtcgccatcaccatcgcgcgtttcaacaactttatcaatgacagcctgctggaaggtgcaattgacgcactgaaacgtatcggtcaggtaaaagatgaaaacattaccgttgtttgggtgcctggtgcctatgagctgccgctggcggcgggtgcactggctaaaaccggtaaatacgacgcggtgattgcgctgggtacggttattcgtggtggcactgcccactttgaatatgtcgctggtggtgcaagcaacggcctggcgcatgttgcccaggacagcgaaattccggttgcttttggggttctgaccactgaaagcattgaacaagcgatcgaacgtgctggcaccaaagctggcaacaaaggtgcagaagctgcactgaccgcgcttgaaatgattaatgtattgaaagccatcaaggcctgaaattagtaaggggaaatccgtgaaacctgctgctcgtcgccgcgctcgtgagtgtgccgtccaggcgctctactcctggcagttgtcccagaacgacatcgctgatgttgaataccagttcctggctgaacaggatgtaaaagacgttgacgtcctgtacttccgtgagctgctggccggggtggcgactaataccgcatacctcgacggactgatgaagccatacctgtcccgcctgctggaagaactgggacaggtagaaaaagcagtactgcgcattgcgctgtacgaactgtctaaacgtagcgatgtgccatacaaagtggccattaacgaagcgatcgaactggcgaaatcgttcggcgcagaagacagccataagttcgtcaacggcgtactcgataaagcagcacctgtgattcgccctaacaaaaagtgatatccaggccggtagattcacggaagaccgttccatgatcgccggccttttcttttttacctgctgaggcataacgtatggcatgtggcgagttctccctgattgcccgttattttgaccgtgtaagaagttctcgtcttgatgtcgaactgggcatcggcgacgattgcgcacttctcaatatccccgagaaacagaccctggcgatcagcactgatacgctggtggcgggtaaccatttcctccctgatatcgatcctgctgatctggcttataaagcactggcggtgaacctaagcgatctggcagcgatgggggccgatccggcctggctgacgctggcattaaccttaccggacgtagacgaagcgtggcttgagtccttcagcgacagtttgtttgatcttctcaattattacgatatgcaactcattggcggcgataccacgcgtgggccattatcaatgacgttgggtatccacggctttgttccgatgggacgagccttaacgcgctctggggcgaaaccgggtgactggatctatgtgaccggtacaccgggcgatagcgccgccgggctggcgattttgcaaaaccgtttgcaggttgccgatgctaaagatgcggactacttgatcaaacgtcatctccgtccatcgccgcgtattttacaggggcaggcactgcgcgatctggcaaattcagccatcgatctctctgacggtttgatttccgatctcgggcatatcgtgaaagccagcgactgcggcgcacgtattgacctggcattgctgccgttttctgatgcgctttctcgccatgttgaaccggaacaggcgctgcgctgggcgctctctggcggtgaagattacgagttgtgtttcactgtgccggaactgaaccgtggcgcgctggatgtggctctcggacacctgggcgtaccgtttacctgtatcgggcaaatgaccgccgatatcgaagggctttgttttattcgtgacggcgaacctgttacattagactggaaaggatatgaccattttgccacgccataaagatgtcgcgaaaagtcgcctgaagatgagtaatccgtggcatctacttgctgtcggattcggaagtggattaagcccgatcgttcctgggacgatgggctcgctggcagcgattccgttctggtatctgatgacctttttgccctggcagctctactcgctggtggtgatgctggggatctgtatcggcgtctatctttgtcatcaaacggcgaaagacatgggtgtgcacgatcatggcagcattgtctgggacgaatttattggtatgtggatcacgctcatggcgctgccgaccaatgactggcagtgggttgccgccgggtttgtgattttccgtattctggatatgtggaagccgtggccgatccgctggtttgatcgcaatgtgcatggcggcatggggatcatgatcgacgatattgtcgccggggtgatttccgcaggcatcctgtattttatcggtcatcactggccgctgggtattctgtcgtagttgtgcaccgatgcctgatgtgacgcttgtcacgtctcatcaggcctggactcttatttaaatcctacgacaggatgcggtttatacggcgtttccagttcggcaatctgttccggcttcaaagtgatatccaccgcgttcaatagctcatcaagctgttcttcgcgcgaagttccgataatcggtgcggcaatgcccggtttactcaacaaccaggccagcgcaacttgtgctcgtgtcgcccccagttcttcactgacgcctgttaaccgctctgcgatctgcgcgtcattttcatcgctttctttatagagatttttccccacctcatcagacaccagtcgtgcggtagtttctccccacggacgcgtcagacggccccttgccagcgggctccatggaattaccgccacgccctcctgataacacagtggtagcatctcgcgctcttcttcacgataaatcagattgtagtgatcctgcatactgacaaactgcgcccagccgtgctgtttttggagttccagtgcctgagcaaactgcgaagcgtgcattgatgacgcgccgatataacgcgctttcccggcttttaccacgtcgttgagggcttccagcgtctcttcgatcggcgtgttgtaatcccagcgatgaatttgcaggatatcgacataatccatgccgagacgtcgcaggctgtcgtcgatagagcgcaaaatttgcgcacgggataatccttccggtaaatcaccaacgcgatggaacactttggtcgcaacgaccacgtcttcacgacgggcgaaatcccgcagtgcgcgaccgacgatctcttcgctgctgccgtcagaataactgttggcggtatcaaagaaatttatgccgccttccagtgcacgtttaattatgggacggctgctttcttccggcagtgtccatgcgtgattaccgcgatctggctcgccaaaggtcatacagccgaggcaaagtcgggaaacgcgaaggtcggtttttcctaaggggttgtattgcatgctgccactcctgctatactcgtcatacttcaagttgcatgtgctgcggctgcattcgttcaccccagtcacttacttatgtaagctcctggggcttcactcgtttgccgccttcctgcaactcgaattatttagagtctatgaataatttcttaagcatagcaggagtggagtagggattatgccagccaggccttgattttggcttccataccagcggcatcgaggccgagttcggcgcgcatttcttcctgagttccttgcggaataaagaagtccggcaggccaatgttcagcacgggtactggtttacgatgggccatcagcacttcgttcacgccgctgcctgcgccgcccataatggcgttttcttctacggtgaccagcgcttcatggctggcggccatttccagaattaacgcttcatcaagcggtttcacaaaacgcatatcgaccagcgtggcgttcagcgattcggcgactttcgccgcttctggcatcagcgtaccaaagttaaggatcgccagtttctcgccacgacgcttcacaatgcctttgccaattggtagtttttccagcggcgtcagttccacgccgaccgcgttgccacgcgggtagcgcaccgctgacgggccatcgttatagtgatagccggtatagagcatctggcgacattcgttttcatcgctcggggtcataatgaccatttccggtatgcagcgcaggtaagagagatcaaaagcaccctgatgggtttgaccgtcagcaccaacaatgcccgcgcggtcgatggcgaacaggaccggaagcttttgaatcgccacgtcatgcagcacctgatcataggcgcgttgcaggaaagtggagtaaatcgcgacaatgggtttgtacccaccaatcgccagacccgcagcaaaggtcaccgcgtgttgctcggcaattgccacgtcgaagtagcgatccgggaatttacgtgaaaactcgaccatgccggaaccttcacgcatcgccggagtaatcgccatcagcttgttgtctttcgctgccgtttcgcacaaccagtcgccaaagatttttgaatagctcggcaaaccgccgctacttttcggcaaacaaccgctggagggatcaaatttaggcacggcgtggaaagtgatcgggtctttttctgccggttcataaccacgaccttttttggtcatgatatgcaggaactgcgggcctttcaggtcgcgcatgttctttagcgtggtgataagccccagcacatcgtgaccgtccaccgggccgatgtagttaaagcccagctcttcaaacaacgtgccaggcactaccatgcctttaatatgttcttcggtgcgtttgagcagctctttaattggcggcacgccagagaaaacttttttcccgccttcgcgcagtgaagagtaaagcttaccggaaagcagctgtgccagatggttgttgagcgcgccgacattttcggaaatcgacatttcattgtcgttgagaatcaccagcatatcaggacggatatcgcccgcgtgattcatcgcttcaaacgccatgcctgcggtaatcgcgccatcgccaatgacacagacggtgcggcgatttttgccttctttttcggcagcaaccgcaataccaattccggcactgatggaggttgatgaatgcccgacgcttaatacgtcatattcgctttcgccgcgccacgggaacgggtgcagaccgcctttctgacggatggtgccgattttgtcgcggcgtccggtcaaaattttatgcggataagcctgatgccccacatcccaaatcaattggtcaaacggggtgttgtagacatagtgcagcgccacggtcagttcgaccgtgcccagcccggaggcgaagtgcccgctggaacggctcacgctgtcgagtaaatagcggcgcagttcgtcgcagagtttcggtaaactctctttcggcaacagtcgtaactcctgggtggagtcgaccagtgccagggtcgggtatttggcaatatcaaaactcatcaggggcctattaatacttattgtttatttattacgctggatgatgtagtccgctagcgcttccagtgccgaggtatcgagtgactgttcagccagttgtttcagcgactgacgggcatcgtcgatcagatcccgggctttcttccgggcttgctcaagacccagaagtgcagggtaggtacttttaccaagttgctggtcggcaccctggcgttttcccaacgttgcagtatctcccaccacatccaggatgtcatcctgaacctggaaggcaaggccgatgctctctgcatacttgtcgagtaccggcagagcacgacgtcctttatctccggcgcttaatgcaccaaggcgaacggcggcgcgaatcaatgcgccggttttatgacgatgaatacgctcaagcgcgtccagaggtacgtgtttgccttccgcgtctaaatctaatgcctgaccaccgcacattccggcaataccactggcgctcgccagttcagaaatcatcgaaattctgtcgcggtccgacacttccggcatatcggcatcgcttaaaatcgagaacgccagcgtttgtaaagcgtcgccagcgagaatcgcgtttgcttcgccaaacttcacatggcaggttggcaaaccgcgacgcagatcgtcatcatccattgccggtaaatcatcatgaattaatgagtaagcgtggatacactcaacggcggcagcgggtgcgtccagcgtgtttgtgctaacgccgaacatatgaccggtggcataaaccaggaaaggtcgcaggcgcttaccacctaataatgcgccatactgcatggtttcgaccacgggagtgttctgaaagggcagtggggcgataaaacggctcagcgcctggttggcctgcttaacgcaggcttcgagttgctgcggaaagtccattactcattgtccggtgtaaaaggggttagagaggcgtcttcattgtcagacagcagaatttgtacgcgctgttcggcttgttgtaatttggcctgcccctgacgtgccagctgcacgccgcgttcgaactcgttcagcgcctcttccagcggcaggtcgccactttccagacgggttacaatctgttccagctcgctcagcgccttttcaaagctggcgggcgcctcatttttcttcggcataatgaatgtctgactctcaatatttttcgccccgtcatggtaacggactcagggcaaatagcaaataacgcgcaatggtaaggtgatgtgcacagcaaagcgatgttagtggtatacttccgcgcctggatgcagccgcaggtgtgggctgctgtatttttccctatacaagtcgcttaaggcttgccaacgaaccattgccgccatgaagtttatcattaaattgttcccggaaatcaccatcaaaagccaatctgtgcgcttgcgctttataaaaatccttaccgggaacattcgtaacgttttaaagcactatgatgagacgctcgctgtcgtccgccactgggataacatcgaagttcgcgcaaaagatgaaaaccagcgtctggctattcgcgacgctctgacccgtattccgggtatccaccatattctcgaagtcgaagacgtgccgtttaccgacatgcacgatattttcgagaaagcgttggttcagtatcgcgatcagctggaaggcaaaaccttctgcgtacgcgtgaagcgccgtggcaaacatgattttagctcgattgatgtggaacgttacgtcggcggcggtttaaatcagcatattgaatccgcgcgcgtgaagctgaccaatccggatgtgactgtccatctggaagtggaagacgatcgtctcctgctgattaaaggccgctacgaaggtattggcggtttcccgatcggcacccaggaagatgtgctgtcgctcatttccggtggtttcgactccggtgtttccagttatatgttgatgcgtcgcggctgccgcgtgcattactgcttctttaacctcggcggcgcggcgcatgaaattggcgtgcgtcaggtggcgcattatctgtggaaccgctttggcagctcccaccgcgtgcgttttgtcgctattaatttcgaaccggtcgtcggggaaattctcgagaaaatcgacgacggtcagatgggcgttatcctcaaacgtatgatggtgcgtgccgcatctaaagtggctgaacgttacggcgtacaggcgctggtcaccggcgaagcgctcggccaggtgtccagccagacgctgaccaacctgcgcctgattgataacgtctccgacacgctgatcctgcgtccgctgatctcttacgacaaagagcacatcatcaacctggcccgccagattggcaccgaagactttgctcgcacgatgccggaatattgtggtgtgatctccaaaagcccgacggtgaaagcagttaaatcgaagattgaagcggaagaagagaagttcgacttcagcattctcgataaagtggttgaggaagcgaataacgttgatatccgcgaaatcgcccagcagaccgagcaggaagtggtggaagtggaaaccgtcaatggcttcggcccgaacgacgtgatcctcgatatccgttctatcgatgaacaggaagataagccactgaaagtcgaagggattgatgtggtttctctgccgttctataaactgagcaccaaatttggcgatctcgaccagaacaaaacctggctgctgtggtgtgagcgcggggtgatgagccgtctgcaggcgctctatctgcgcgagcagggctttaacaatgtgaaggtatatcgcccgtaatttgtggtttttacgtcgcatctggtcagatgcgacgtttgccgcatccgacactactcgtaataattataaatccctgccgccatcaccagttgtgatgccacttcatgggctttttcacgcccaaccaacaggtcgataattttcagaccaaagtcgatagctgtacccggcccctggctggtcagcaattttacccgtgcatcccagacgacgcgcttgtccagccattgttcggcgggaattttgtctttcagcgtcgggaagccggtcatattaccaatcgggaagatatcgtgcggcaccagcacggtggctggcgcggcgcaaatagccgcgacgatacgcccggaacggtggaactgtttaacggtttcaaccagcagagtgctatcgcgaaaacactccgcgcctttaatgccaccaggcagcacgatcacgtcatattcgccatcagccacttcgaccagcggcgcatccgccagcagcttcacgccgcgcgagcaggtaatcgccaggttaccatcgctggcgacgctggcagtggtgactttgataccgccgcgaaccagcagatcgatagtggtgacggcttcagtctcttcactaccaggggcgaggcaaaccagtgccgatgcgctcatattcactctcctttctttttaccatttcaaacaggcgggtgttttccggtacggcaatcccatgcgcgcgggcgcggcgtaagagaaaaccattgatatagtcgatttcagtgtggcgcagcgcgcggatatcctgcaacatcgacgagatattttccgctgtggcatcaatcacctgcatcacgtaatcacgcaaatcttctgctgaagtatgatgcccttcgcgttcgatcaccgccgcgacttcttcgcatatctgcataatttcttgcggatgatgacgtaattcaccgttcgggcaattccagatggcagtcagtggattaatcacgcagttgactgccagcttgcgccacagctcggcgcgaatattgttatgccaggcaacgtcaggcaacacggtttgcaaaatatccgccagataactgtaatccccgtcctgttgccgtgccgggccaatatgcgtgataccgtttgccacatgaataatgacattgccgtcgcggcgggctgcatgggtggtggtgcccatcagtaatggctgctgaatgttttgcaactcttcgatggtgcccatgccgttgtgaattaacagtattggcgtagttacaggcagtgtggacgcgaggcttttgacggcatcggaaacctgccatgctttcagcgtcaccaggagcagatcgctggtggcgagaaaatcgggatcgttggcggtcagcgattcgttaaatatcgaaccatctgtctcaaccagattcacgctacaataaggttgcggtacgcgcagccagccctgaacttcatgaccctgtttgcaaagtgctgtaagccataattgccctaaggcaccgcatcccaatacggtaattttcattgttcctcctcacccgcaaccactccgggtgttcaataaggctatcccttaattgtgcatgctgttgcgactatgcacaattaagggatacgtcctggtgcaggactgtcggttatttaactttgcgggtattatgcttcgcatcaaaaatgaagggagaggaaaagatgccatctttcgatattgtctctgaagttgatcttcaggaagcacgtaacgcggtcgataacgcgagccgcgaagtggagtcccgttttgacttccgtaacgttgaagcctcatttgagctgaacgacgccagcaaaaccatcaaagtgttgagcgagtccgatttccaggtcaatcagttgctggatattctgcgtgccaagctgctgaagcgcggcattgaaggcagttcgctggatgtaccggagaatatcgttcatagcggtaaaacctggtttgtggaagcgaaactgaaacagggcattgagagcgcgacccagaagaaaatcgtcaagatgatcaaagacagcaaactgaaagtgcaggcgcaaattcagggcgatgaaatccgcgtaacgggcaaatctcgtgatgatttgcaggctgtcatggcgatggtacgtggtggcgatctcggtcagccgttccagttcaaaaacttccgcgattaatcgcgactatgtgcgttttgttcatgtcagatgcggcatgaacgcctgattcggcctacaaaggtttgtaattcagaaactttgtaggcctgataagcgtagcgcagcaggcaattcgccgcgttttttatgcctgacgaattgcctgttctatctcaaagcgattcgtcactttgctgtcgattttcacataagctgaatgttcttcttctgcaatcaacacttctttgatgccttcagtttctagcaaacgcacttttaacgcctcgtttgcggcaatgttcgccgggatttcaatgcgcaaactgctgacatacggcggttctttcatggtactggcgactgtcagccacactgcggccagcattgcgccagcgagaaataccccctgaccgtcaaacatgccgttaatccagccgcccagcgaaccgccaatcgccacgccaagaaactggctggtggagtaaacacccatcgccgtacctttgtaacctgctggcgactctttactgataagtgagggcaggagggcttccatcaaattaaacgccacaaagaaaagctgcacgccgaccaccagttgccagaactgcgtttgcgcgttccacaacacaatttccgcaaccacgatcaacccgacgcagaagacaaagacttgcttcattttgcgcttaacttcagcgtagataatgaaaggcacgaccgagccaaaggcgattagcattgtcgccagatagaccttccagtgttcagccgccgggaaccctgcatcagccagttgtccgggcagggcaacaaacgtcgacatcagcaaaatatgcagacacataatgccaaagttgagtttcagcagccgcggttccgccagcactttactgaaactgcctttcaccattccggactcacgattaagtacgtgagtgctactgttgggcacaacccaaatggtcaacgcaatgccggtcgttgccagaatagcgatcatccagaacagcgcgtgcagcccaagtttgtgagtgatgatcgggccaagcaccatcgcaatggcaaaggtaatgccaaagctcacgccgataaacgccatcgctttggtgcggttttgttcgcgcgtgagatcggaaagcagcgccataacggcggcggcaattgctccagagccttgtagcgcccggcccagaataattccccagatggagtcggaaagcgcagcgataacgctaccggcggcaaacaccgccagcccaccgacaattaatggtttgcgaccaatgcggtcggaaagcaggccaaacggaatctgaaaaacggcctgagtcagaccataaataccaatggcaataccgattaatgcttcgctggcaccttgcagagccatgccgtacgtggtcagaaccggcagaaccataaacatgcccagcatgcgcaacgagaatacggtccctaaaccccaggtcgcgcgcctctcacctggcgtcattttataatcgttcattaccacctctgttttaaattcgcgactagtgtaaagcggcaaacgaatggggtaaacatgcggattttttagtaaatatttcgagagggatatgtttctaatgctaagaaaaaaggtgccgtagcacctttttaatagagaggttttgttaccacacagcagccagcagcgtatgcgagtccggtaccataaaatcaacggacatcatcaccgagagggcagtgatggcgatgatagagaagccgaacagcttgcgcgcccagattctgtcatcagcaactttataaccgcgcagagccatacctaaccaccagacgctaaccgccgcggcgaccaccagatatttatacccagcgtaaccgccaagagagagcatcagcgtggcaacggcaaaggcgatgatatacagcgtgatgtgattcttcgccaccgaaatgccttttaccactggcaataccggaatgtttgccgcctggtaatccttaaagcggaaaatggcgatggcataggagtgaggcatctgccacaggctgaagatagccagcaggatcgctgcgccgctatcgaactcaccggttaccgcacagtagccgatcaccggcggcgcagcgccggagagcgaaccaatcaacgtgccgtagacagagtggcgtttcatgtacaggctataaacgccgacataaaccacaaagcccatcacccccagccagcaggccagcggattcgcgccaaaccacagcagcataaagccagcaatacccagcaacgtggcgtacaccagcgagacagcaggagagatcaggcctttcaccagcacccgattcttcgtcctttccatctttctgtcgatatccctgtcgatgtagttgttaaacacacaacccgacgccacaaccagtgacaccccaaccagcgtgtagataaacaggggataatcaatgctgccctttgaggccagcaggaatcccccaatcaccgagatcaggttgccaaagatgatgcctggtttcgttacttgcaggtattgcttaaacatcataaccgccgctcttagtgcatcatcatgttgtagttgaggttccacataatccagatggagcctacaaccaggatagcgatgattagcacggtgaagacaaacgccgtcatgttccagccttcatctgatttggtattcatgtgcaggaagcacaccagatgcaccagaacctgtaccactgccattgccaggattgttcccagaattacggccggagaggcagctcctgtcatcaccatccagaacggaatcaccgtcagaatgatcgacaggataaagcctgtcatgtaggtttttacgctgccatgggacgcgccgctgtgatcggtagaatgactcattacatcgcccccatcagataaacaacagtgaacacacagatccaaaccacatccaggaagtgccagaacaggctcaggcacatgatgcgggtacggttagtgctggtcaggccgcgacgggcgatttgcaccatcagcaccgccatccagataagaccagaagtgacgtgcagaccgtgcgtgccgaccagcgcaaagaacgctgacaggaagccgctgcgatccggacccatgccgttaacaatcaggtgatggaattcatagatttccatcccgataaatccggcaccaaacaaccaggtcaacgccagccaggagataacctggcttttgttgtttttgtacatggcgatagccgccatgccgtaggtgatggagctgaacaacagcaagaaagtttcaaccagaacgaacggcagttcgaaaatgtccttacctgtcgggccgcctgcggtgccgttcaccagaacggcataggtagcaaacaagatagagaacagaatgcagtcgctcatcaggtagatccaaaatccgaagattttggttccgcctgcatcgtggtgcccgtgttcgtgcgcgtgggcagtcgcgtgcgtcaaagtatcagttgccatttttcagccctgccttagtaatctcatcgaaatgctggttttccagtttttcgatttctgccaccggcacgtagtaatccacgtcctcgtcgaagcttttcacgatccaggtgatgatcatgcctgcgaagccaacaatcgccagccaccagatatgccagatcatggcgaaaccgaagatggtggagaaagctgcaatgacgatacctgcaccgctgtttttcggcatatgaatttcttcatagtggtcaggctttttatacgcttcgcctttctctttcatttcccagaatgcatcacgttcgtgaacgtgcggcactacggcaaagttatagaacggaggcggggaagaggttgcccactccagcgtacggccaccccacgggtcgccagtcaggtcacggttctggtcgcggtcgcgaatagaaacgtacatctgaataacgaggcagagaatacccagcgcaatcagtactgcaccgctggctgcaatcatcagcatggtgtggaactgcgggtcaatctgctggctcaaacgacgggtcatgcccatgaagcccagcgcatacagtggcataaaggcaacgaagaagccgatgatccagaaccagaacgcgcgtttaccccaggtttcgttcagtttgaaaccgaacgctttaggccaccagtaggtcatccctgcgaagcagccgaagaccacgccgccgatgatcacgttatggaagtgcgcaatcaggaacaggctgttatgcagaacgaagtccgcgcccggtacggccagcagcacgccagtcatcccgcccaccgagaaggtgacgataaaaccgatggtccacagcatcgcagaatggaacacgatgcggccctgatacatggtgaacagccagttgaagatcttcaccccggtcgggatggcgataatcattgtggtgataccaaagaaggcgtttacgttcgcgcccgcacccatcgtaaagaagtggtgcagccaaacgatgaacgacagcacggtgatacagacggttgcccataccagcgaggtataaccaaacagacgtttacgcgagaaggttgccgcaatttcggagaacacaccgaaaacaggcaggatcaggatgtaaacttccgggtggccccaggcccaaatcaggttgatgtacatcatcatgttgccacccatatcgttggtaaagaaatgggtgcccagatagcgatccagggtcaacaacgcgacggtaaccgtcagaattgggaaggaagcaataatcagtacgttcgcgcacagtgatgcccaggtaaatactggcatcttgaacatggtcatgcccggtgcgcgcatcttcagaatggtaacgaagaagttgataccggtaagcgtcgtacctataccggatagctggagactccatatccagtaatcgacaccgactcccggactgtactctattcccgatagcggtggataggccagccagccggtctgcgcaaattcgcccacgccgagagaaacgttaaccagaatcacaccaacaacggtaaaccagaagcttaagttgttgaggaacgggaacgcaacgtcacgcgcgccgatctgcagcggaaccaccaggttcatcagaccgataacgaaaggcatcgccacgaagaagatcataatcacgccgtgcgcggtaaagatctgatcgtagtggtgaggtggcaggaagcccgcttcgcccgccgaggcaagagcctgctggctacgcatcataatggcgtcagcaaaaccacgcagcaacatcacaatcgccacgatgatatacatgataccgaggcgtttatggtcgacggaggtcagccactctttccacaggtaggtccacttaccgaagtaagtgatcaggccaacgagcgccagacctcccaaaataatgccagcgatcgtaaccatgacgataggttcatggaacgggactgcatcaagtgataattttccgaacatctttattcttcctcaacccctttaatgggcggattccgcgtggctcatgtccatgccttccataccttcgtgtgcgctgtgctcaccttctggctgggtcatgtccatgctcttaccgtgagccataaacttgttaattacatcggcaaacaagtctggtttcacgttggagaaatattccacctggttgtattcgctaggcgcggccagtttttcgaacgcagccatgtcagacatggtgttcggcgactgcttcgcttttgcgacccactggtcgaatgcggcgcgatccggtgttgcaatagctttgaacttcatgcctgagaagcccgggccgctgtagctggcggagataccgtcataagtgccgggttcgttggcgatcagatgcaggcgagtctgcataccggccatggcataaatctggctacccagacgcggaatgaagaaggagttcatcacggagttggaggtcactttgaagtacaccggagtgttcgccgggaaagcgatttcattcacggtagcaatgccctgttccgggtagatgaagaaccatttccagtccatggaaaccacttcgatggtaatgggcttctcgtcgtgtgccagcggcttgctaggctcaagagcgtgagtggttttccaggtcagtactgcaaggaagatgatgattaagataggtaccgtccagaccacagcttccactttattggagtgtgaccagttcgggctgtacttagcatctttattgctcgcacggtacttccaggcgaaaccaacagccatcaagattgcgggaataacgacaatcaacatcaggccaaatgccgtcagtatcagtgaacgttgctccagaccaatctgtcctttgggatctaacagcgcagaattacagccactgagcaatacagtgcctgcaaataatgacaaccatcccaaacttttattgtatttcctgagtctcatttaacgacctcaattccacgggatctggtggcgtttaaagtgtgtgggcattttacgggaaggttacattactgtaaacatgattaaattcctgttacttggatttggctgccaggtcacatatgttgcaaaacatatcaggttgattttaagaagctgttgcaaaagggcgttataacaaaaggggagtgctgaaggagtctgggcgggcaattggtataaccaatgtgaaataaaacaattatttaacaaataattatcattagagtgacaactgggtgatgagaaaataaagactcattagctgaatcgtgtaagaaaaatagaatttataaatggcgccaataatttccaaacgctaagccgcacaaaagaacaaatattaataagcgatactgatgtttatttagccgtaataattacggcgagtgattactacagctaaataatatttacagattacgtcagatgcgtttttcgtagcgccagataatccagcaaaccaccaagcacgacgccagaaagggcgactaaaaccccgacttccagcagagcaggcaggaaagagaagtgcgtcaaatccagcgcgtccatcgtcaatagcagtaaccacacggccaacaggctgacgcccgccgccagtgtccacatggcaaaggcataacctgccggatatgcggtacgggagataaagttgtcatttactcgtgtatattcaagcgtctggcggcaaaccagcagcaaaataagccctggtacggcagcggcgacggagaatagatagaatgtcgaccagccgtgtgcttcaacaaaccaacccgccacggggccgacataaactcgccctacagcagaaagcgctgagagcagggcaaattgagtagcggaaaatgacttattacatagcgtcattaacagcgcgacaaaggctgatgtgcccatcccgccacagaggttttcgaaaaagacggctgcgcccatgctgtagagatgcttatcagtaatcgacagcagccagtaaccggcgttagacgcaccttgtaaaatgccgaaaatcagcagtgcccggaacagtgacaggcgctgcatcaaaatcccaccgtacaatgcgccaacaatggtcgctagtaagccaagcgttttgttaaccacgcctacttcacccgcatcaaacccgacgccgcgaatcaaaaacgtggttgtcaggctcatggcgaatgcgtcgcccagcttatacagcacgataagaagcaaaataagccaggcattattgcgaccaaagaaatctcgcagaggtgcaacaaccgcttgttccagcgttttgggcacaggaatggtgtcggttggttctggtgcaagcaacgtcgcgataatacaggggatcaacagtgccgccattaaccagtacatgccctgccagcccagccatttatctgccagccacagggctaggccgccggaaaccagcatccctaaacggtaacccagcacgctgattgccgcgcccgcaccacgttcttctgccggaagcacatcggttttccacgcatcgaagactatatcctgggaagcagagcaaaaagcgatcaccactgccagcgccgccatccagcggagttgggtgcctggttcgagaaaacccatcgccgcaatggcgactaataacaggatttgcgtggcgagcagccaaccgcgccgccgcccaaaaaatggaggcgtgtagcggtccatcagcggtgaccagaggaatttaaaaacgtaagcctggcctaccagagagaagaaaccaatggttttgagatcgatattctcgaccgtcatccaggcctgtaaggtaccggatgtcagggcgagcggtagcccggaagcaaaacccaggatcagcaatatggctgaacgcggctgttgaaaaatacgtaaatattgactggacatgggcgtctacaggcccggcttgcaccgggccagagggcagaaattaacgcgcgttctgcttgatgaattcgtggatgctggtgtcctgagacatatcagcgatggtatcggtcagcacactgttaaccgcatcggcgatatttttgttggaggcctggaacgcaccttcaacgttgtagctggcacgatagtttttggtcattttgttgccattctgcgcggtagcgatgatggcgatatccgctttggtcgcgatgttgtagcgcacgttgccctgggacacgtcagcatacagttggctaacgatgatttgcagattaaccgggccattcggaccaaccatgtaaccacgcgcggtcatctgtttttccagcacttcttgcagcaggaaacgcagatcgcgggaggcggtcagggtaacgatttgattatcgcgggtgacttttgccagcgcctgatcggtacgctgatcggcaccattaatgcttacggtgacgcccatcaggcttggatcctgctgtggcagtgtaatcgtcggggaaacttcaatagttgttggcggttttgcgcatcctgcaagcataaacagagcaactaacgggaagaggatttttttgaacatgttcgggctctcagagactcttaagcgtgtttggtaaaaattcccgccatcataacattgccaacggcgaggggaagtgggtaaggcatgtaaattcatcatgttgacgaaataatcgcccctggtaaaagaaacactgatgcgaggcctgtgtttcaatctttaaatcagtaaacttcatacgcttgacggaaaaaccaggacgaaacctaaatatttgttgttaagctgcaatggaaacggtaaaagcggctagtatttaaagggatggatgacatctcagcgttgtcggaggagatatttcatgatgatacgtgagcggatagaagaaaaattaagggcggcgttccaacccgtattcctcgaagtagtggatgaaagctatcgtcacaatgtcccagccggctctgaaagccattttaaagttgtgctggtcagcgatcgttttacgggtgaacgttttctgaatcgtcatcgaatgatttacagtactttagcggaggaactctctactaccgttcatgcgctggctctgcatacttacactattaaggagtgggaagggttgcaggacaccgtctttgcctctcctccctgtcgtggagcaggaagcatcgcgtaaaaacgcatttgcaactgtcggcgcttttccagtatgttgctaaagattttatgaaaaacggcctgcgggccgttttgttttgtctggattttgcgctttttgcccagcattcagacgaaaattgcccgggaattgtgaaaaaatacgcgacagcgcgcaataaccgttctcgactcataaaagtgatgccgctataatgccgcgtcctatttgaatgctttcgggatgattctggtaacagggaatgtgattgattataagaacatcccggttccgcgaagccaacaacctgtgcttgcggggtaagagttgaccgagcactgtgattttttgaggtaacaagatgcaagtttcagttgaaaccactcaaggccttggccgccgtgtaacgattactatcgctgctgacagcatcgagaccgctgttaaaagcgagctggtcaacgttgcgaaaaaagtacgtattgacggcttccgcaaaggcaaagtgccaatgaatatcgttgctcagcgttatggcgcgtctgtacgccaggacgttctgggtgacctgatgagccgtaacttcattgacgccatcattaaagaaaaaatcaatccggctggcgcaccgacttatgttccgggcgaatacaagctgggtgaagacttcacttactctgtagagtttgaagtttatccggaagttgaactgcagggtctggaagcgatcgaagttgaaaaaccgatcgttgaagtgaccgacgctgacgttgacggcatgctggatactctgcgtaaacagcaggcgacctggaaagaaaaagacggcgctgttgaagcagaagaccgcgtaaccatcgacttcaccggttctgtagacggcgaagagttcgaaggcggtaaagcgtctgatttcgtactggcgatgggccagggtcgtatgatcccgggctttgaagacggtatcaaaggccacaaagctggcgaagagttcaccatcgacgtgaccttcccggaagaataccacgcagaaaacctgaaaggtaaagcagcgaaattcgctatcaacctgaagaaagttgaagagcgtgaactgccggaactgactgcagaattcatcaaacgtttcggcgttgaagatggttccgtagaaggtctgcgcgctgaagtgcgtaaaaacatggagcgcgagctgaagagcgccatccgtaaccgcgttaagtctcaggcgatcgaaggtctggtaaaagctaacgacatcgacgtaccggctgcgctgatcgacagcgaaatcgacgttctgcgtcgccaggctgcacagcgtttcggtggcaacgaaaaacaagctctggaactgccgcgcgaactgttcgaagaacaggctaaacgccgcgtagttgttggcctgctgctgggcgaagttatccgcaccaacgagctgaaagctgacgaagagcgcgtgaaaggcctgatcgaagagatggcttctgcgtacgaagatccgaaagaagttatcgagttctacagcaaaaacaaagaactgatggacaacatgcgcaatgttgctctggaagaacaggctgttgaagctgtactggcgaaagcgaaagtgactgaaaaagaaaccactttcaacgagctgatgaaccagcaggcgtaatttacgcagcataacgcgctaaattcgcacaaaggcccgtcaccgccaggtggtgggcttttttttgtcatgaattttgcatggaaccgtgcgaaaagcctctttcggtgttagcgtaacaacaaaagattgttatgcttgaaatatggtgatgccgtacccataacacagggactagctgataatccgtccataaggttacaatcggtacagcaggttttttcaattttatccaggagacggaaatgtcatacagcggcgaacgagataactttgcaccccatatggcgctggtgccgatggtcattgaacagacctcacgcggtgagcgctcttttgatatctattctcgtctacttaaggaacgcgtcatttttctgactggccaggttgaagaccacatggctaacctgattgtggcgcagatgctgttcctggaagcggaaaacccagaaaaagatatctatctgtacattaactccccaggcggggtgatcactgccgggatgtctatctatgacaccatgcagtttatcaagcctgatgtcagcaccatctgtatgggccaggcggcctcgatgggcgctttcttgctgaccgcaggggcaaaaggtaaacgtttttgcctgccgaattcgcgcgtgatgattcaccaaccgttgggcggctaccagggccaggcgaccgatatcgaaattcatgcccgtgaaattctgaaagttaaagggcgcatgaatgaacttatggcgcttcatacgggtcaatcattagaacagattgaacgtgataccgagcgcgatcgcttcctttccgcccctgaagcggtggaatacggtctggtcgattcgattctgacccatcgtaattgatgccagaggcgcaactgtgccgctatacttatccagggcggcacaacgctgtaagcggcttgcgcctgagaatggcatttgcgtcgtcgtgtgcggcacaaagaacaaagaagaggttttgacccatgacagataaacgcaaagatggctcaggcaaattgctgtattgctctttttgcggcaaaagccagcatgaagtgcgcaagctgattgccggtccatccgtgtatatctgcgacgaatgtgttgatttatgtaacgacatcattcgcgaagagattaaagaagttgcaccgcatcgtgaacgcagtgcgctaccgacgccgcatgaaattcgcaaccacctggacgattacgttatcggccaggaacaggcgaaaaaagtgctggcggtcgcggtatacaaccattacaaacgtctgcgcaacggcgataccagcaatggcgtcgagttgggcaaaagtaacattctgctgatcggtccgaccggttccggtaaaacgctgctggctgaaacgctggcgcgcctgctggatgttccgttcaccatggccgacgcgactacactgaccgaagccggttatgtgggtgaagacgttgaaaacatcattcagaagctgttgcagaaatgcgactacgatgtccagaaagcacagcgtggtattgtctacatcgatgaaatcgacaagatttctcgtaagtcagacaacccgtccattacccgagacgtttccggtgaaggcgtacagcaggcactgttgaaactgatcgaaggtacggtagctgctgttccaccgcaaggtgggcgtaaacatccgcagcaggaattcttgcaggttgatacctctaagatcctgtttatttgtggcggtgcgtttgccggtctggataaagtgatttcccaccgtgtagaaaccggctccggcattggttttggcgcgacggtaaaagcgaagtccgacaaagcaagcgaaggcgagctgctggcgcaggttgaaccggaagatctgatcaagtttggtcttatccctgagtttattggtcgtctgccggttgtcgcaacgttgaatgaactgagcgaagaagctctgattcagatcctcaaagagccgaaaaacgccctgaccaagcagtatcaggcgctgtttaatctggaaggcgtggatctggaattccgtgacgaggcgctggatgctatcgctaagaaagcgatggcgcgtaaaaccggtgcccgtggcctgcgttccatcgtagaagccgcactgctcgataccatgtacgatctgccgtccatggaagacgtcgaaaaagtggttatcgacgagtcggtaattgatggtcaaagcaaaccgttgctgatttatggcaagccggaagcgcaacaggcatctggtgaataattaaccattcccatacaattagttaaccaaaaaggggggattttatctcccctttaatttttcctctattctcggcgttgaatgtgggggaaacatccccatatactgacgtacatgttaatagatggcgtgaagcacagtcgtgtcatctgattacctggcggaaattaaactaagagagagctctatgaatcctgagcgttctgaacgcattgaaatccccgtattgccgctgcgcgatgtggtggtttatccgcacatggtcatccccttatttgtcgggcgggaaaaatctatccgttgtctggaagcggcgatggaccatgataaaaaaattatgctggtcgcgcagaaagaagcttcaacggatgagccgggtgtaaacgatcttttcaccgtcgggaccgtggcctctatattgcagatgctgaaactgcctgacggcaccgtcaaagtgctggtcgaggggttacagcgcgcgcgtatttctgcgctctctgacaatggcgaacacttttctgcgaaggcggagtatctggagtcgccgaccattgatgagcgggaacaggaagtgctggtgcgtactgcaatcagccagttcgaaggctacatcaagctgaacaaaaaaatcccaccagaagtgctgacgtcgctgaatagcatcgacgatccggcgcgtctggcggataccattgctgcacatatgccgctgaaactggctgacaaacagtctgttctggagatgtccgacgttaacgaacgtctggaatatctgatggcaatgatggaatcggaaatcgatctgctgcaggttgagaaacgcattcgcaaccgcgttaaaaagcagatggagaaatcccagcgtgagtactatctgaacgagcaaatgaaagctattcagaaagaactcggtgaaatggacgacgcgccggacgaaaacgaagccctgaagcgcaaaatcgacgcggcgaagatgccgaaagaggcaaaagagaaagcggaagcagagttgcagaagctgaaaatgatgtctccgatgtcggcagaagcgaccgtagtgcgtggttatatcgactggatggtacaggtgccgtggaatgcgcgtagcaaggtcaaaaaagacctgcgtcaggcgcaggaaatccttgataccgaccattatggtctggagcgcgtgaaagatcgaatccttgagtatcttgcggttcaaagccgtgtcaacaaaatcaagggaccgatcctctgcctggtagggccgccgggggtaggtaaaacctctcttggtcagtccattgccaaagccaccgggcgtaaatatgtccgtatggcgctgggcggcgtgcgtgatgaagcggaaatccgtggtcaccgccgtacttacatcggttctatgccgggtaaactgatccagaaaatggcgaaagtgggcgtgaaaaacccgctgttcctgctcgatgagatcgacaaaatgtcttctgacatgcgtggcgatccggcctctgcactgcttgaagtgctggatccagagcagaacgtagcgttcagcgaccactacctggaagtggattacgatctcagcgacgtgatgtttgtcgcgacgtcgaactccatgaacattccggcaccgctgctggatcgtatggaagtgattcgcctctccggttataccgaagatgaaaaactgaacatcgccaaacgtcacctgctgccgaagcagattgaacgtaatgcactgaaaaaaggtgagctgaccgtcgacgatagcgccattatcggcattattcgttactacacccgtgaggcgggcgtgcgtggtctggagcgtgaaatctccaaactgtgtcgcaaagcggttaagcagttactgctcgataagtcattaaaacatatcgaaattaacggcgataacctgcatgactatctcggtgttcagcgtttcgactatggtcgcgcggataacgaaaaccgtgtcggtcaggtaaccggtctggcgtggacggaagtgggcggtgacttgctgaccattgaaaccgcatgtgttccgggtaaaggcaaactgacctataccggttcgctcggcgaagtgatgcaggagtccattcaggcggcgttaacggtggttcgtgcgcgtgcggaaaaactggggatcaaccctgatttttacgaaaaacgtgacatccacgtccacgtaccggaaggtgcgacgccgaaagatggtccgagtgccggtattgctatgtgcaccgcgctggtttcttgcctgaccggtaacccggttcgtgccgatgtggcaatgaccggtgagatcactctgcgtggtcaggtactgccgatcggtggtttgaaagaaaaactcctggcagcgcatcgcggcgggattaaaacagtgctaattccgttcgaaaataaacgcgatctggaagagattcctgacaacgtaattgccgatctggacattcatcctgtgaagcgcattgaggaagttctgactctggcgctgcaaaatgaaccgtctggtatgcaggttgtgactgcaaaatagtgacctcgcgcaaaatgcactaataaaaacagggctggcaggctaattcgggcttgccagcctttttttgtctcgctaagttagatggcggatcgggcttgcccttattaaggggtgttgtaaggggatggctggcctgatataactgctgcgcgttcgtaccttgaaggattcaagtgcgatataaattataaagaggaagagaagagtgaataaatctcaattgatcgacaagattgctgcaggggctgatatctctaaagctgcggctggccgtgcgttagatgctattattgcttccgtaactgaatctctgaaagaaggggatgatgtagcactggtaggttttggtacttttgccgttaaagagcgtgctgcccgtactggccgcaacccgcagaccggtaaagagatcaccatcgctgctgctaaagtaccgagcttccgtgcaggtaaagcactgaaagacgcggtaaactaagcgttgtccccagtggggatgtgacgaagttcaagggcgcatctactgatgtgccttttttatttgtattcggtgactttctgcgtcttgtgggctgacaattgcccccgtttcttgtcacaataggcctttgcgcgcatcgatacgttgcgtgaggtacacagtcatctacagcggagtgttgttacaccatgatggacagcttacgcacggctgcaaacagtctcgtgctcaagattattttcggtatcattatcgtgtcgttcatattgaccggcgtgagtggttacctgattggcggaggcaataactacgccgcaaaagtgaatgaccaggaaatcagccgtgggcaattcgagaacgccttcaacagcgagcgtaatcgcatgcagcaacagctgggcgatcaatactccgagctggcagcgaacgaaggctatatgaaaaccctgcgtcaacaggtgctgaatcgtctgatcgacgaggcgctgctggatcagtacgcacgtgagctgaaactgggtatcagcgatgagcaggttaaacaggcgattttcgcgaccccagccttccaggttgacggcaaatttgataacagccgctataacggtatcctcaaccagatggggatgaccgccgatcagtacgcccaggcgctgcgtaaccagctcactacccaacagctgattaacggcgttgccggtaccgattttatgctgaaaggtgaaaccgacgagctggcggcactggtcgcgcaacaacgcgtggtgcgtgaggcgactatcgatgttaacgcgctggcggcgaagcagcctgtgaccgaacaggagattgccagctactacgaacaaaacaaaaacaatttcatgacgccggaacaattccgcgtgagttacatcaagctggatgccgcaacgatgcagcaaccggttagcgatgcggatatccagagctactacgaccagcatcaggatcaattcacccagccgcagcgtacccgctacagcatcatccagaccaaaactgaagatgaagcgaaagcggtacttgatgagctgaataaaggcggtgattttgctgcattagccaaagaaaaatctgccgatattatctctgctcgtaacggcggcgatatgggttggttagaagatgccactatcccggacgaactgaaaaatgctggtctgaaagaaaaaggccaactgtctggtgtcatcaaatcttcggtcggtttcctgattgtacgtctggacgacattcagccagcgaaagtgaaatcgttagacgaagtacgtgacgacattgcggcgaaagtgaaacacgaaaaagccctcgatgcgtactacgcgctgcagcagaaagtgagcgatgcggcaagcaacgacaccgagtctctggccggtgcagagcaagctgccggcgttaaagccactcagacgggttggttcagcaaagataacctgccggaagagttgaacttcaagccggttgccgacgctatctttaacggcggtctggtaggtgaaaacggcgcgccgggcatcaactctgacatcatcaccgtagacggcgaccgcgcattcgtgctgcgcatcagcgagcacaaaccggaagcggtgaaaccgttggcagatgttcaggaacaagttaaggcattggttcagcacaacaaagctgaacaacaggcgaaagtggatgctgagaaactgctggttgatttgaaagccggcaaaggtgcggaagctatgcaggctgccggtctgaaatttggcgagccgaaaaccttaagccgttccggtcgtgacccgattagccaggcggcgtttgcactgccactgccagcgaaagacaaaccgagctacggtatggcgaccgatatgcaaggtaatgtggttctgctggcgctggatgaagtgaaacaaggttcaatgccggaagatcagaaaaaagcgatggtgcagggtatcacccagaacaacgcacaaatcgtctttgaagctctgatgagtaacctgcgtaaagaggcgaaaatcaaaattggcgatgcgctggaacagcaataatcctgaagccgcctcgcaaaaaaatgcgttgcagctgtaacaagaaaaggtcgctttcgcggccttttccatttctgaacattgccatttgtttactgttttcactgccgttaaggtgattccactgttaacaaacaaggagaaaacagtatgaaacacggaattaaagcactgctcattaccctgtccctggcctgtgccggaatgtctcatagcgcgctggcggcagcttctgtggcgaaaccgacggcggtagaaaccaaagcggaagctcctgcagcacaaagtaaagcagcagtaccggcgaaagccagtgacgaagaaggcacccgggtcagcattaataatgccagcgcggaagagctagcccgcgcgatgaatggcgttggcctgaagaaagcgcaggcgattgtcagttatcgcgaagagtacggtccgtttaaaactgtggaggatctaaagcaggtgccggggatgggcaattcgctggtggaacgtaatctggcggtattaaccctgtaattaatttgcatagtggcaattttttgccagactgaagaggtcataccagttatgacctctgtacttataacaacaacgtaaggttattgcgctatgcaaacacaaatcaaagttcgtggatatcatctcgacgtttaccagcacgtcaacaacgcccgctaccttgaatttctcgaagaagcccgctgggatgggttggaaaatagcgacagttttcagtggatgacggcccataacatcgccttcgtcgtggtcaatatcaatattaactatcgtcgcccagcggtattaagtgacctgttaactattaccagtcagttgcagcaattaaacggtaaaagcggcatcttaagccaggtcattacactggagccggaagggcaggtggtagcggatgcgcttattacgtttgtttgtattgatcttaaaacgcagaaagcattagctctggaaggggaattgcgcgaaaagctggagcagatggttaagtaaacgttttgtggtgccggatgctcaagccgcatccggcgacacccggaataattacctcaacccggttttctgcttcatcgctgccatcaccgtcggtttatcggccagataatgattcaaaccgttggcgcgtaaattacatgccgcacaatgaccgcaaccgtcgcctttaaagccgttatagcaggtcaacgtttcgttacggactaaatccagtttgccgtaataatctgccagcgcccaggtttccgctttatcaatccacatcagcggcgtttcaaaacgaatatctttcgccatgcccaaactgacggcatggtttagtgctttcacaaactcatcgcggcaatccgggtagccggagaaatccgtttcgcagacgccagtaattacggcttctgcttttacctgatacgcatatattgccgccagcgtcaggaacaaaatattacgccctgggacaaacgtattcgggataccatcggcttcaggttcataatcaggcaccggaatgctgtcacgcgtcaggctactgaccgccagctcgttgagcagggtgacatccagcaccttatgcgcgcgtgcccccagtttcagcgccagttcgcgtgccacgtcgatttctgcgcgatgccgctgaccgtaatcgaacgtcacgcaatggacttcatcatattgttgtaatgcctgcaccagacaggtggtggaatcctgacctccactgaacacaacgacagcacgtttcatagataatcctgcttgaacaataaaagcgttatggtaacgcctgcgattaacccggaccagctattcattgcgatggcgcgggaagccaggcttcggtaaattcaaaccagccgcgcggtgtcagtcgcacaccgttcacgccgggaggggcactaatgcgatagtgatagttgaacagcggcgtcagcgtcgcatctgtcattaactggctaaaaaccgctttcagggcattaaatcggttttcttcatcaggcattatttgcacggcatccagtgtcgattgtagatgtgcgtatgctggagcgtcgaaaacatgtggccacagcggatcgcagcgcagccattgctccagagtatattccggtgcttcgccaattaatctgtcgcccatcatgaggtctgcgtgtgcctgtagggtcgtgtcgtcccagttttttgcgttatgaaaaataattgtgagttcacagccttccgctgccagtgtcgcctgtaggcgttctgccatggtatgaagttctatcggtaggtgataaaccagcgtcaaggttttcggtagtttgacttcatccggtacctgccaatgcggaatagtccagcctggcagtaatgcatgactggcggtgatcaggttttctccgacttctaacgtttgtaataaaccggattgatgaataatggagatcacttttcgcgcctgccagagggagagtcggggacttttgcgcaacgtcaaatagcaaaaacctaaactgatgccgctactgacctggctgacccgttgcagctcctccggtttgccgatggtgatttgcacgggatgccgacaactggttcccaaatctttttcgaaaagcggcggagttatccagtactcaaccgctttaagcagcggatgacgtaaatggtaataatcatggctttccaggcgcaccagctctgctgtgaattgtgttaagcgaaaaggacccgtgccgatcagtgggaattgcggatgcgccagatggctgcaatagctcgccagccggtgcgcaagccagtaatcagggcgatgtaaaaagaaggtcagacactgcggatgggtgacttcaatacgcttcacgctaataaataattgatccagtgctggcagttgtaacagcatcaataatcgctggtgtaagtgtgaggcttttactgcatcgccgttatgccagtgtagggttgaacgaagataaaagtcccagcgtaacccgtcagtagaggtttcccagtgatgcgctaaatcgccaatcgggcgctgagtattattatcgaagcgggtcaggccggaaaatatctgcccggcgagatgctgctcggcacggccgggcaaaaagcctggttgtagcggttcgagcgggcgatagtagggaatacgcaacgtgggtgtatcgttttgccattgtccgcccataaacggctgtaacagagtgcgcagctcacctggggccagttgcgccagctccagcacatcttgctgctttccggtttccagtgcctgttccatcatcgcattgcgtagcgattccggcgtgaccagaaagcgtaattgtccgcgctttccgcgtcctgactgcgcctgccactccagccatcccgcctcctgtgcctgacgcaacagcgtacgaacatggcgttcgctgcaaaaacagcgttcggccagttcgctgacggtgacggtttgcggctttccggcggaaggttgccacagacgttgatactggttaagacggttgagcaatcgcatataaacccggaacaatattatttaactattcactattacttccgtatatatcaggtgatactcaatcaccattaaccgtgtcacagagtggagaaagaaatggctcgtctggcagcatttgatatggatggcactttattgatgcccgaccatcatttaggtgagaaaaccctctctactttggcgcgactgcgtgaacgcgacattaccctcacttttgccacggggcgtcatgcgctggagatgcagcatattctcggggcgctatcgctggatgcgtatttgattaccggcaacggaacgcgcgtgcattctctggaaggtgaacttttacatcgtgatgatttacctgcggatgtcgcggagctggtgctgtatcagcaatgggatacccgagccagcatgcatatcttcaatgacgacggttggtttaccgggaaagagatccctgcgttgttgcaggcatttgtctatagcggttttcgttatcagataatcgatgtcaaaaaaatgccactcggcagcgtcaccaagatctgcttctgtggcgatcacgacgatcttacacgcttgcagatccagctatacgaagcattaggcgagcgtgcacatttgtgtttttccgccacggattgcctcgaagtgctgccggtgggctgcaataaaggcgctgcattgacggtgctgacccaacatttaggtttatcgttgcgcgattgcatggcctttggtgatgcgatgaacgatcgcgaaatgttagtcagcgtcggtagcggatttattatgggcaatgcgatgccgcaactgcgcgcggagctcccgcatttaccggtgattggacattgccgaaatcaggctgtctctcactatttgacgcactggctggactatccacatctaccttattcccccgaataacgagatcccttccagcaccgggcaattgcccggttttttttgcgttgaatttgtcattttgtgccgtggtgtttaaaccgcacagaataaattgtcgtgatttcacctttaaaataaaattaaaagagaaaaaaattctctgtggaagggctatgttagataaaattgaccgtaagctgctggccttactgcagcaggattgcaccctctctttgcaggcactggctgaagccgttaatctgacaaccaccccttgctggaagcgcctgaaacggctggaggacgacggtatccttatcggcaaagtcgccctgctggatccggaaaaaataggcctcggcctgaccgcttttgtgctgataaaaacgcaacatcacagcagcgaatggtattgccgctttgtcacggtggttaccgaaatgccagaagtgctggggttctggcgcatggctggtgaatacgattatctgatgcgcgtccaggttgccgacatgaaacgctacgacgagttttataagcgtctggtaaacagcgtgccggggctgtcggacgtcacttccagcttcgcgatggaacagattaaatacaccacttctttacccatcgaataaatatccagaatcaggtcaggacacaacgcgtgcgattatttgctcaattaagctggtatttccgtcgggaatggcgtcgctatctcggggctgtcgccttgcttgtcattatcgcgatgctgcaactggttccgccaaaagtggttggtattgttgtcgatggcgtgacagaacaacactttactaccgggcagatcctgatgtggatcgccaccatggtgctgattgccgttgtggtttatctcctgcgttacgtctggcgggtattgctgtttggtgcgtcttatcaactggctgttgaactgcgtgaagattattaccgtcagctaagccggcagcatcctgagttttacctgcgtcatcgcaccggtgacctcatggctcgtgcgaccaatgacgtcgatcgcgtcgtgtttgccgccggagaaggggtgctgacgctggtggattcactggtgatgggctgcgctgtgttgattatgatgtctacgcaaattagctggcagttgaccttattttccctgttgccgatgccagtgatggcgatcatgattaagcgcaacggcgatgctttgcatgaacgctttaagctggcacaggcggcgttttccagtcttaatgaccgcacccaggaaagcctcaccagtatccgcatgatcaaagcctttggtctggaagatcgccagtcggcgttatttgccgcggatgccgaagataccggcaaaaaaaacatgcgggtggcgcgtattgatgctcgtttcgacccgaccatctatatcgcgattggtatggcgaacttgctggcgattggcggcggtagttggatggtggtgcagggcagtttaacgctgggccagctcaccagttttatgatgtatttaggtctgatgatttggccaatgctggcgctggcatggatgtttaacattgtggaacgtggtagtgctgcgtacagccgtattcgcgcgatgctggcggaagcgccggtggtgaacgatggtagcgaacccgtgccggaagggcgtggcgaactggatgtaaatattcaccagttcacgtatccgcagactgaccatcctgcgctggaaaacgtcaatttcgccctgaaacccggtcagatgctgggtatctgcgggccgactggttccggcaaaagtaccctgttgtcgctcattcagcgtcatttcgacgtcagcgagggggatattcgctttcatgatattcctctgacgaagttacaactcgatagctggcgtagccgcctggcggtagttagccagacgccattccttttttctgacactgtggcgaataacatcgcgctgggttgcccgaatgccacccagcaagagattgagcatgtcgcgcggttagccagcgtacatgacgatattttgcgtctaccgcaaggttacgatacagaggtgggcgagcgcggtgtgatgctttccggcgggcaaaaacagcgtatctccattgctcgtgcgttattagtcaacgcggaaatcctcatccttgatgatgcgctttcggcggtggacggacgcactgagcaccagatcctgcataacctgcgtcagtgggggcagggaagaacggtaatcatcagtgcccatcgcctttctgcactgacggaagccagtgaaattattgtgatgcagcacggacatatcgcccagcgtggcaatcatgatgtgctggcacaacaaagcggctggtatcgcgatatgtatcgctatcaacaactggaggcggcgctcgacgacgctccggaaaatcgcgaggaggccgtcgatgcgtagttttagccaactgtggccgactctcaagcgcctgttagcgtacggttcgccgtggcgtaaaccgctggggattgcggtcctgatgatgtgggttgcggcggcggcagaagtcagtgggccgctgcttatcagctattttatcgacaatatggtagcgaaaaataacctgccgttgaaagtggttgcagggctggctgcggcgtatgttgggctgcaactgtttgccgccgggctacattacgcgcagtcgctgctgtttaatcgggcggcagtaggcgtagtgcaacagttgcgtaccgacgtgatggatgctgcgttacgccagccattaagcgagtttgatacccaacccgtcgggcaggtgatttcccgcgtcactaatgacactgaagtgatccgcgatctctacgttaccgtagtggcaactgtcctgcgcagtgccgcgctggtgggcgcgatgctggtggcgatgttcagcctcgactggcgaatggcactggtggcgataatgattttcccggtggtgctggtggtaatggtgatataccagcgttacagcacgccgattgtccgtcgtgtgcgcgcctatttggcggatatcaacgacggctttaacgaaatcatcaatggcatgagcgttatccagcagtttcgtcagcaggcgcgatttggcgaacgtatgggggaggccagtcgttcacactatatggcgaggatgcaaaccctgcgcctcgacggttttctgctgcgtccgctgctgagtctgttttcatcgctcattctttgtggcttgttgatgctgtttggcttctccgccagcggcaccattgaagtgggcgtgctgtatgcgtttatcagctatcttgggcgacttaacgaaccattaatcgaactgaccacgcaacaggcgatgctgcaacaggctgttgttgctggtgagcgcgtgtttgaactgatggacggaccgcgccagcaatatggcaatgatgatcgcccgttacagagtggcaccatcgaagtcgataacgtgtcatttgcttatcgcgatgacaatctggtgctaaagaacattaatctctctgtgccttcgcgcaattttgtggcgctggtcgggcataccggcagtggcaaaagcaccctcgccagtttattgatgggctattacccgctaacggaaggtgagattcgccttgatggtcgtccattaagttcgctaagtcacagcgcgctgcgccagggcgtggcaatggtgcagcaagatccggtggtgctggcggataccttcctcgccaacgtgacgctggggcgggatatctccgaagaacgcgtctggcaggcgctggaaaccgtgcaactggcggagctggcgcgtagcatgagcgacggtatttacacgccgctgggcgagcaggggaataatctctcagttgggcaaaagcaactgctggcactggcgcgcgtgctggtcgagacgccgcaaatcctgatccttgatgaggcaaccgccagcattgactccggtactgaacaggcgattcaacatgctctggcggcggtgcgtgaacataccacgctggtagtgattgctcaccgcttatcgaccattgttgatgccgacaccattctggtgcttcatcgtgggcaagccgtggagcagggcactcaccagcaactgctggcggcccagggacgctactggcagatgtatcaactgcaacttgcgggcgaagagctggcagccagcgtgcgtgaagaggaatcattgagcgcctgaatagcgcaatatttcatcgttggtgcaaaaatgtaacgcactgtgcactgtcatagtgcgttttcattttcaaacttcttaacttcctgctctctttctcgtttttcatttctggcacaccgcttgcaataccttcttcgtgtagcagaaccattaccgaattctgaccggaggggatctatgaagctggtgaccgtgataatcaaaccattcaagctggaagacgttcgtgaagcgttatcttccattggtattcagggcctgaccgtcaccgaagtgaaaggtttcgggcgtcagaaagggcatgccgagctgtaccggggggcggaatacagcgtcaatttcctgccaaaagtaaaaattgatgtggcgattgctgatgaccaactcgatgaagtgatcgatatcgtcagtaaggcggcttacaccggaaaaattggcgacggcaaaatcttcgtcgctgaattgcaacgcgtcattcgtattcgtaccggcgaagccgacgaagcggcgctgtaatctctggcacacagcaacaggaacgaaaaatgaagatagcgacgataaaaactgggcttgcttcactggcgatgcttccgggactggtaatggctgcacctgcggtggccgataaagccgacaatgcgtttatgatgatttgtactgcgctggtgctgtttatgactattccggggattgccctgttttacggtgggttgattcgcggcaaaaacgtgctgtcgatgctgacgcaggtgacggtgacatttgcactggtctgtattctctgggtggtttacggttactcgctggcgtttggtgagggcaacaacttcttcggcaacattaactggttgatgctgaaaaacatcgaactgacggcggtgatgggcagcatttatcagtatatccacgtggcgtttcagggatcgtttgcctgcattaccgtcggcttgatagttggggcgctggcggaacgaatccgcttctcagctgtgttgattttcgtggtggtatggctgacgctctcttacattccgattgcgcatatggtgtggggcggtggtttgctggcttctcacggtgcgctggatttcgcgggtggcaccgtggtgcacattaacgccgcaatcgccggtctggtgggcgcgtatctgataggaaaacgcgtgggcttcggtaaagaggcgtttaaaccgcacaacctgccgatggtcttcaccgggactgccattctctatatcggttggtttggctttaacgccgggtcagcgggcacggcgaatgaaatcgcggcactggcatttgtgaatactgtggtcgcaacggcggcggcaattcttggctggatcttcggtgaatgggcgctgcgtggtaagccttcactgctgggggcgtgttctggcgcgattgccggtctggtcggcgtgacgccagcctgcggctacattggggttggcggcgcgttgattatcggcgtggtagctggtctggcgggcttgtggggcgttaccatgctcaaacgcttgctgcgggtggatgatccctgcgatgtcttcggtgtgcacggcgtttgtggcattgtcggctgtatcatgaccgggatttttgccgccagctcgctgggcggcgtgggcttcgctgaaggtgtgacgatgggccatcagttgctggtacagctggaaagcatcgccattacgatcgtctggtccggtgttgtggcatttatcggctacaaattggcggatctgacggttggtctgcgtgtaccggaagagcaggagcgagaagggctggatgtcaacagccacggcgagaatgcctataacgcgtaacaagcactgcaaaaaacagccggacggttttcacctccggctatttttttaattgtgattacgcatcaccccttcctgaacggtcgaggcaaccagtacgccgtcttgggtataaaactcaccgcgcacaaagccacgtgcgctggacgccgaggtgctctccacgctatacagcagccattcattcaaattaaacgggcgatggaaccacatggaatggtcaatggtggcaatctgaatccccggttcgagaaaaccgatgccgtgcggctgtagagctaccggcaggaagttaagatcagaagcgtaaccgagcagatactgatgaacgcgcaggtcatccggcacgctaccatttgcgcggatccacacctgacgatgtggttctgcgacgtgacctttcagtgggttatgaaactccaccggacggacttccagcggacgatcgcagatgaatttatctttcagcactggcggcagcaggtgcgccagcgattgggcgatttgcgtttccgaagggaggccatcaggcgctggcgcggacggcattgttttttgatgttcgaaacccgcttctggtgcctggaaagaggcagtcatataaaaaatcggtttgccgttttgaatagcagcaacccggcgggcgctgaagctgttaccgtcacgcagcgtttcgacatcataaataatcggcttcttactatcgccagggcgaagaaagtagctgtgaaacgaatgtaccagccgctcttcagggacggtctcttttgcagcatacaaggcctgacccacgacctggccgccaaacacctggcgtaaacctaaatcttcactctggccgcgaaagagtccttcctcaattttttccagatttaacaatgtcagtaaattttttagcgcctgactcatataactctccagtaacaaagctgccgcagcaagccaaagtgagttgagtataacgcaaatttgctactggtccgatgggtgcaatggtctgaattacgggctaattacaggcagaaatgcgtgatgtgtgccacacttgttgacgttactattttgttaaccactcttccggcgaggaaagttagcccgctggtgcattgataataaggagaaatgaatgaaactcgtgcacatggccagtggtttagcggttgcgattgcgttggcggcttgcgcagataaaagcgcggatattcagacgccagcaccggctgcaaatacgtctatttcagcaacacaacaaccagctatccagcaaccgaatgtctccggtaccgtctggatccgtcagaaagtcgcactgccgcctgatgctgtgctgaccgtgacactttctgacgcgtcgttagccgatgcaccgtcaaaagtgctggcgcagaaagcggtgcgtactgaaggtaaacagtcaccattcagctttgttctgtcatttaacccggcagatgttcagccgaacgcgcgtattctgttgagtgcggcgattaccgtgaatgacaaactggtatttatcaccgataccgttcagccggtgatcaaccagggcggaactaaagccgacctgacattggtgccggtacagcaaaccgccgtgccggttcaggccagcggtggcgcaacgactaccgtaccttcgacttcaccaactcaggtgaatccgtcttcggcagttccagctcctacgcaatattaagcgacgttaaccctctccgcccggagagggttagtagttccagcgataacgctgcaagtcgatttgcccgcttcccgataccatcacaccttctgccagtaatgcctgtcgctgacgctgtaaatccggtccggttagcgaaattgtgccgtggcgattaaccacccggtgccagggtaaggtgctgccttcagggagacgctttaacacaccgcccacctggcgcgcggcgcggggcgatcccgccagtttcgccacatcaccgtaagtggtgacatagccttcgggaatagcggcgacgatttgccagacgcgttggggaaatgaatcttctttttccatcttttcttcctgaggtaatttttcagcataatctggaaaaacgcccgagtgaagtcgcattgcgcaagaaaccagcatctggcacgcgatgggttgcaattagccggggcagcagtgataatgcgcctgcgcgttggttctcaacgctctcaatgggggctctgttggttctcccgcaacgctactctgtttaccaggtcaggtccggaaggaagcagccaaggcagatgacgcgtgtgccgggatgtagctggcagggcccccacccatttctgcctcccaccgtttcgtcaaaaaatcccaacatggctaaactttaaccacaactgacgtcgcaagaattgtctggctgcgcagtacgcttcggaggtatgtctgatgaagtatgttgatggttttgtggttgccgttcctgccgataaaaaggatgcctatcgggaaatggccgctaaggctgcgccattgtttaaagagtttggcgcgcttcgtattgtcgaatgctgggccagcgatgtaccggatggcaaagtgaccgattttcgtatggcggtgaaagcggaagagaatgaagaggttgtctttagctggattgaatacccttcaaaagaggtccgcgacgctgctaatcaaaagatgatgtcggacccacggatgaaagagttcggcgagtccatgccgtttgacggcaagcgaatgatctatggcggattcgagtcaatcatcgacgaataggtagcgtgacgggctgtgcggcgtgccgtcagcccaaaaattcacaaatgttgctcggcccagcgtaagaaatcttctttcggtaatgccttgctgtagagccagccctgaccgtagtgcacgccatgctggcgtaaccactcttcttgtttactggtttcgattccctccgctaccattttcagtttcagtgtttttgccatttcgatgatatgcggcgtgacatttttatattccagcgcatcaacgaaagatttatcgatcttcagaatgtcgacatccagatcctgtaaataacttaaacttgaataccccgtaccaaaatcatcaagataaatttcatggcccgcctcccggtagcgagaaattatcggggcgctggttttcggatcggcaaactcgcgttcagtgagttcaagcgcgatctgtctgggattaacctgatagtgattgatcatgtcacgcagcaattgcgggattttttccgaggtgagcacgggggattcaagattgatcgaaatatgctgctgtggatgctgacgcagccagtcgcccatatcttcaaagacgcttcttataatcagtagcgtcaatggctcagaaaggcccgtttgctgtgccagcggaataaaactatctggtgacaaccaactaccgtctgtctgcggccagcgcgccagtgcctcagcaccgacaattttgccattggctaaggagacaatcggctgatagtgcacgcaaatatcacgattttcgatagcatcctgcagccgatgatgcggtgactgaatacggcgcaaaatacgcagcacaaacatcgctgccagcaggccaatcaccaacccgagcggtaaccaaataaagacttgccgatgccagcctttctgcaacattttcgttgaagcccatgtgatgatcgaaatattcatctccggtaagggcaggatatcgtaaatgattccattattttcgatatgctcaccgggtgttttttgtagcctggtaataattccctgagcaatttcatcgctgctggttatgacaacgttatgggcattgccaataatggcggcatcaatttgccatgagctatagggaatgacatcaataaaggaagcggggtcgatcatgacgacataatgtgccgttcccatggcgaccatgtaacggataatgcctaaatcgttatgcgatgttaaccagacacgataaccatctttcgaaattttacctggctcggggaaggtatcgggcggactttcatgctccagagacgaacactggggaacgttgttatcgatataagccacttcctgaatatagcgataactgtaagatacccgacgcatttccatgagatgggcttcgctacaggcagcgccttgccatctttccagctcctgcagcgcatctttcccttgtgtcgccaccttattggctcgaatagcgacgcgggaggaataggtatccagctcttcaataaacgatgtttctacctgctgatgggccagccagatgcttaagccgacaggcagcaatactgaaagaatcagtactcccgaaataaggccgaccagatgtcgtgttctcaccagcatatccttattaacacagtgtagggaaagtatatctgattgtggaaaaaggctggctggagataaggaggtagagctggtatttcatgaagtgatgggtggaaacgatcattgtcatttgaccaggcgcagagctttacgcctggtatgtaaccctaacttaagatgttgattcggcgcgagcgagggtaaaaatatcgtaaaaagacagttcacctttacggacgatcattttttgcagttgttccttatgaacatccgcgacacgcggagagttcaagatggcttcaaccagcgcggcaggtacaaagcgcgtgttgtaccattcgccgttatagcaaacgcggaaatccagcacgtcgatatcttcatagcggtagcgtgggtagacatcgaaaaagaagaaaccattaagcaggataaataatacaaccagtagccagacagagcctgacagcgtttcggactgcaacatcaccgccagggtggcaaaaaaagcaacgtacataccgataaacagccccggatgtttacggataaaactgatactaaagcggggtttgttgtcgcgtttttcgcgggtattcagagactcaatcgtttcggtcagcaggcgttgtatttcggtcatcgtttgccttcgtggtatctgcaactttccagggaacaccctattttaacgtgggaatagtagaggggaagtaacagatctaccacaattttgcataacagttgcgaaaaaccgattacaattttttaattattctggctggattaccgcccacgacaacgttgtccgggacatcttttgtgacaactgcacctgaggctaccacgacgttatcaccaatggtcacaccagggttaatgaccgcgcgtccgccaatccagacgttattaccgatggtgacgggtttccccagttcagcaccgctattacgtgctacagggtcgatgggatgtgttgccgtgtagatatgaacgcctggtgccaacatacagttatcaccgatgcgaatagggcagacatcaagcatcacgcaatcgaagttggcgaaaaaattattaccgagaaaaatgttatagccatagtcacagcgaaacgttggctcaatataagcctctgtcacctgaccgaatagatcagcgagaatttgctggcgtaatgtgtgctcttccgccagggaatgattgtatcggtgaataagctgacgagcgcgcaggcgatcgcgagataacgtctcatctgccgagcgatacaactcaccagcaatcatcttttctttttctgtgctcattactgacctccggttgctgaaaatgcggcaacacagtaagacgaaaagtcagtgaagagaacgttcccattacatctgtgtgataaagatcacatagggtatgtcttcatggcgaaaaagtataaaattcttaataaacagccggttatagctccgaaagcgaattatttattagcgaataaatttccatactgaggaagggatcttgtcgtacagtttattcatggtcaattcggcgaggcggtgatctgcggctgagtaaaataccgccagttcattatctgataattcgtatttatttttctcgataacacgctccagcgtgtcaattgtctggcaacgacgtaaacgcattaaataatcggttttcgttaaaggtttttcggacatacttctacctatggttgtaataattctaacaagataaactcgcaggattctctttcgtcgcattgacaaaacaacggaatagtcgattacctgacttccgccatttctgaagatcctgcatattaataccataactactgaacaacataaaggtgtcatccagatattcgtcgatctgctcaatgagcttattgtcttcattatacttaattttgtaattaagtgcgaaggtcgcaatatgctcaatcagttcattcaactggaggttgatcgccgaggttgggtcgtttacccagccatgattgctttcttcaaggtttgcaaggcagtcatgatacagggtttcacagagaaacttaagctgtgcgatatcatgtcttttgggtgagtattcatccataacgcgtccccttcttagcggttgaactaacggacacctttcgggatggaaaaaacttactgacctggacttgccctctcgtttgttagcttaactataagccactctttgcaggttttcatcgcattattacgaaaaattacaattaggaaggaagcgggacaggactcactttttcatactagcactaacccgcagcaggtaaaagcagtttgctcgaactattcataacatttcaggattatcgccagatgaaattggtgacactaataccaggattgctctgaatatgacgtaataaccgaggaatgaataaagaattaccgcaaataattaagaatagcctctaaatgattatggattattaaatctattagcgctacttaatataaattaactaacaatcagtattttttatgaattttatccgtggttaatactggttttcgtatgagatcctgagttggtggttcaattactccttaatgttcgtaggttatgcataaaaaaggccgcttacgcggccttagtgattacacgttgtatcaatgatgatcgacagtatggctgtgctcgatatcttcattcttgcggctaaagcggcggcgaaccaccacaaagaataccggaacgaagaagattgccagtaccgttgcggtcaccatcccgcccattacaccggtacctactgcgttctgcgcgccggaaccagcaccagtactgataaccagcggcataacgccgaggataaacgccagcgaggtcatcaggatcggacgtaaacgcatccgcaccgcatcaagcgtcgcttcaatcagacctttaccttctttatccatcaagtctttggcgaattcgacgataaggatcgcgttcttcgccgacaacccaatggttgtgagcaggcctacctggaagtaaacgtcattggtcaggccacggaaggtggcagccagcaacgcaccgataacccccagcggaacgaccagcataacggagaacggaatcgaccagctctcgtacagcgccgccagacacaggaacacgacaatcaacgaaatcgcgtacagtgaaggtgcctggttgccggagagacgttcctgataggacatccccgtccagtcatagccaacaccggtaggcagtttgctcgccagttgttccatcagctccattgcttcaccggtacttttacccggtgccgcctggcctaagatttccatggatggcaggccgttgtaacgttccagacgcggcgaaccgtactcccaacgagaagaggagaacgccgagaatggcaccatctgaccatcagcagcacgaacataccagtcgccgatatcatccggcagcatacggtatttcgcttctgacatgacataaactttcttcacacgaccgcggtcgataaagtcgttcacatagctgccgccccatgcagcgcccagagtggtgttaatgtcgttgatagaaacacccagcgcctgcgctttttcctggtcgatatcaatcttaaactgcggggtatcttccagaccgtttggacgtacgctggtcaacatatcagggtgcttcgctgcttctgcaagcaactggttacgcgcctgagtcagtttttcgtgaccaaggccagcctggtcaatcagctcaaagtcaaagccggttgcagtacccagttccacgattgcgggcaggttaaaggcgaaaaccatcgcatctttgatttgcgagaaagcgcgtgttgcacgcatggtaatcgcttcaactttgttttcttcgcccggacgatcggcccagtccttcaaggaaacgaacgcaataccggtattctgaccacgtcccgcaaagccgaagccgttaacggcgaacaccgactcaacgttgttcttttctttggtcagatagtaatgcgttacctcattgagcactttctgtgtacgttcctgcgttgcacctgctggcagctgaaccatggtcataaacacgccctggtcctcatctggcaagaaggagcttggcagacgcacgaacagataggccatgccgaccacgatgatcagatacagcaccaggtaacgccccgtactgcgcagaataccgcctacgctgtcggtgtagtggtgcgtgctcttctcgaacatgcggttaaaccagccgaagaagccttttttaccttccccgtgatcgcctttggcaatcggtttcagcatggtggcacaaagagctggagtcaggatcaacgccaccagtaccgacagcgccattgctgaaacaatggtaatagagaactgacgatagatagcaccagtagaaccgccaaagaaggccatcggtacgaataccgccgacagtaccatcgcgataccgaccagagcgccctgaatctgccccatcgacttacgggtagcttcttttggcggcaaaccttcttccgccataacacgctcaacgttttctaccacaacgatggcgtcatccaccaacaggccgatggcgagcaccatcccgaacattgttagcgtgtttatcgagaagccaaaggcggcaaggacggcaaaggtcccgagcaataccaccggtacggcaatggtcggaatcaacgtcgcgcggaagttctgcaggaacagatacataaccaggaacacgaggatgatcgcttcgaccagcgttttaaccacttcgtgaatagagattttcacgaacggcgtggtgtcgtatgggtaaacaattttcagacccgacgggaagaacggttccatcttcgccagttcagcacggattgccgcagcggtatccagcgcgtttgcaccggtcgccagcttgatccccagaccggaagccggttggccgttaaactctgcgatgatgtcgtagttctcaccacccagctcaatcttcgcgacgtcacgcagcagcacgcgggaaccatcctgattcactttcagcaggattttgccgaactcttcagtagaggtcagacgcgtctgagcaataatagaggcgttaagctgttggcctttcaccggcggcgtaccaccgagctgacccgccgcaacctgggcgttctgcgctttgatggcggtaatgacatcaaccggcgttagctggaatttgttcagctcattcgggttcatccagatacgcatcgcgtactgtgaaccgaacaactgaacatcacccacgcccgacgtacggctgatggcatctttcatattcgccgccacgtagtcggagatatcctcctgcgtcatggtgccatcggtgttgataacgccgacaaccatcaggaagctgctggatgatttctcaacgctcaccccttgctgctgaacttcttgcggcagcaacggcatcgccagctgcagtttgttctgcacctgaacctgcgcgatatccgcatcagtaccagactcaaaggtcagggtgatctgcacggtacccgtggagtcactgttagaggacatgtacatcaggttatcgataccgttcatattctgttcgataacctgtgtcaccgtgtcctgcactgttttcgcatcagcgccggggtaggaggcggagatcgttactgccggcggtgcaatcgtaggatattgcgccaccggcagtttgaggatcgccagcccccctgccaacatgatgataatggcgatcacccacgcaaaaatcgggcgatcgataaagaaattaggcatgtcttaacggctcctgtttaagttaagacttggactgttcaggctgagcaccgcttgcggcttgctggttattatcagcggtaacttcttgtgcttttacctggacaccaggacgcactttctgcagcccacttattactacgcgatcgcctgctttcagaccttctgtcaccagccacttatcgccaatagcctggcttgcaacgatcggacgggtttccactttgtcatccgcgccaactaccagtacggtggcatcgccacgcggcgtacgggttacgccctgttgcgggactaaaatagcgtttggattaagcccttcttccagacgtgcgcgcacgaacatacccggcagcagagtgtgatccgggttcgggaagatagcgcgtagggtgatagacccagtggtctgatcaacggtaacgtcagagaattccagcgtaccgtcctgcgggaacttaatgccgtcactggtgatcagtgacactttggctttgccgttctcttgtttcagcgtgccattcgccagttcctgtttcaggcgcaggaagtcgttgctggactgggtcacatcaacgtagatcggatcaagttgctgcacggttgccagcgcagtcgcctgaccgttctgtaccaatgcgccttccgtcacgttcgacttaccaatgcgaccgctaatcggagaggtgactttggtgtaagccagattgatccgcgcagtttcaacggcagctttcgccgcagttaccgcagcattcgcctgttgcgcatcagccagagcctgatcgtactcttgcttactgatgtactgagtaccgagcagtttctgataacgattcaccgtcaattgcgcgatattggctgcagcctgggctttcgccagatcacctttcgcactgtcgtatgtcgcctgataggtcgcaggatcaatctgatagagagagacacctgcttcgatgtcgctaccttctttgaaattacgcttcaggataatcccgctaacttgaggacgaacttctgcgatccggtaggcactggtgcgacccggaagctcggttgtgatctgcagaggttcagttttgactgttactacgccaacggcgggcatctgctggccaccttgttgggcctgtttgtcgtcacatcctgttagggctaagctgcctgagagcatcagaacgaccgccagaggcgtaaaccctctgtttttgttcatatgtaaacctcgagtgtccgatttcaaattggtcaatggtcaaaagttaataaacccattgctgcgtttatattatcgtcgtgctatggtacatacattcacaaatgtatgtaaatctaacgcctgtaaattcacgaacatatggcacgaaaaaccaaacaagaagcgcaagaaacgcgccaacacatcctcgatgtggctctacgtcttttctcacagcagggggtatcatccacctcgctgggcgagattgcaaaagcagctggcgttacgcgcggtgcaatctactggcattttaaagacaagtcggatttgttcagtgagatctgggaactgtcagaatccaatattggtgaactagagcttgagtatcaggcaaaattccctggcgatccactctcagtattaagagagatattaattcatgttcttgaatccacggtgacagaagaacggcgtcgattattgatggagattatattccacaaatgcgaatttgtcggagaaatggctgttgtgcaacaggcacaacgtaatctctgtctggaaagttatgaccgtatagaacaaacgttaaaacattgtattgaagcgaaaatgttgcctgcggatttaatgacgcgtcgcgcagcaattattatgcgcggctatatttccggcctgatggaaaactggctctttgccccgcaatcttttgatcttaaaaaagaagcccgcgattacgttgccatcttactggagatgtatctcctgtgccccacgcttcgtaatcctgccactaacgaataaccctgaatctgactccaggatttttcctggacattttcgtcgttgctattctggttcactgcgtcgtgatattcttgcggtttgactttttcaggtcgttcttcaggttcagaaaccttcattcatcatgactatgttccagtattacaaacgatcacggcattttgttttttcagcatttattgcttttgtttttgtcttgttatgccagaacacggcgtttgcgcgggcgtcatcgaatggtgatctgccgacaaaagcggacctgcaggcgcaacttgactcactaaataaacaaaaagatctttctgctcaggacaaactggtgcagcaggatctgacagatacattagccaccctcgataaaatcgatcgcataaaagaagagacagttcagctacggcaaaaagtcgctgaagcgccggaaaaaatgcgccaggcgaccgcggcgttaacagcacttagcgatgtcgataacgacgaagaaacgcgcaaaattctgagcacgctgtcgttgcgccagctggaaactcgcgttgcccaggcgctggacgatttgcaaaacgcacaaaacgatctggcgtcttataacagccagctggtttcgttacagacgcagcccgaacgcgtgcaaaatgcgatgtataacgcttcgcagcagctgcaacaaattcgcagtcgtctggatgggactgatgtcggcgagacagccttacgtcccagccagaaagtgttaatgcaggcccagcaggcgttgctgaatgcggagattgaccagcagcgtaaaagcctggaagggaacaccgtcttgcaggataccttgcaaaagcaacgtgattacgtgacggcgaacagcgctcgtctggagcaccagttacaactgttgcaagaagcggtaaacagcaagcgcctgactttaaccgaaaaaacggcgcaggaagccgtctccccggatgaagccgcgcgtattcaggctaatccgctggtgaagcaggaactggaaattaaccagcagttaagtcagcgtctgattaccgcgactgaaaacggtaatcagttgatgcagcaaaacattaaagtcaaaaactggctggagcgggcgctgcaatcggaacgcaatattaaagagcagattgccgtcctgaagggcagcctgctgttgtctcgtatcctttaccagcaacaacaaacgctgccctcggcggatgaactggaaaacatgaccaaccgcatcgcggatttgcgtctcgaacagtttgaagttaaccagcagcgtgatgcactcttccagagcgatgcgttcgtcaacaaactggaagaaggtcacaccaacgaagtcaacagcgaagttcacgatgcgttattgcaagtggttgatatgcgtcgcgaattgctggatcaactcaacaaacagttgggtaaccagctgatgatggccattaacctgcaaatcaaccagcagcagttaatgagtgtgtcgaaaaacctgaaatccatcctgactcagcaaatcttttgggtgaacagtaaccgtccaatggactgggactggatcaaagcgttcccgcaaagcctgaaagatgaatttaagtcgatgaaaatcacggtgaactggcaaaaagcctggcccgccgtttttatcgctttcctcgctggtttgccgctgctgttgattgccgggctgatccactggcgtctgggctggctgaaagcgtatcaacaaaaactggcttccgctgtgggttccctgcgtaacgacagccagctcaacacaccaaaagcgatccttatcgacctgatccgtgcgctgccggtgtgcctgattattctcgcggttggcctgattctgttgaccatgcagctcaacatcagcgaactgctatggtcgttcagcaaaaaactggcgatattctggctggtgtttggcctgtgctggaaggtactggagaaaaacggcgttgccgtacgtcacttcggcatgccggaacagcagaccagccactggcgtcggcaaattgtccgcatcagtctcgcattgctgcctatccatttctggtctgtggtggcagaactttccccgctgcatctgatggatgatgtgctggggcaagcgatgattttcttcaacctgctgctgattgccttcctggtatggccgatgtgccgcgaaagctggcgtgataaagagtcgcacaccatgcgactggtcaccattaccgtgctgtcgataatcccgattgcgctgatggtgctgactgctacaggctacttctacactacgctgcgtctggcaggacgctggattgaaaccgtttatctggtgatcatctggaacctgctgtaccagacggtactgcgtggcttaagcgtagcggcgcggcgtatcgcctggcgtcgtgcgctggcgcgtcggcagaatctggtgaaagagggcgcagaaggtgctgaaccgccggaagaacccaccattgcactggagcaagttaaccagcagacgctgcgtattaccatgttgctgatgtttgcgctgttcggtgtcatgttctgggcaatttggtccgatttgatcaccgtgttcagctatctcgacagcatcacgctctggcattacaacggcactgaagctggcgctgcggtggtgaaaaacgtcaccatgggcagtctgttgtttgcgattatcgcctcaatggtggcctgggcgttgattcgcaacctgcctggtttactggaagtgctggtgctctcgcgactgaatatgcgccagggcgcgtcgtatgccattactaccatccttaactacatcattattgctgttggtgcgatgacggtgttcggatcgctgggcgtctcttgggataaactccagtggctggccgcagcattatccgtaggtcttggttttggtttacaagaaattttcggtaacttcgtctccggtttgatcattctattcgaacgtccggtgcgtattggcgatacggtaaccattggtagcttctcggggacggtaagtaagatccgtattcgtgcgacaacgattaccgatttcgatcgcaaagaagtgatcatcccgaacaaagcgtttgttaccgagcgtctgatcaactggtcgttgactgacactactacgcgtctggtgatccgtctcggcgtggcctatggctccgatctggaaaaagtgcgtaaagtgttactgaaggcggcgactgagcacccaagggtgatgcacgaaccaatgccggaagtcttctttacggcatttggtgccagcacgttggatcatgagctgcgtctgtatgtgcgtgaactgcgtgaccgtagtcgtactgtcgatgagctgaaccgtactatcgatcagctgtgccgtgaaaacgacatcaacattgcctttaaccagcttgaagtgcatctgcacaacgagaagggcgatgaggtgacggaagtaaaacgcgactacaaaggcgatgacccgacgccagcggtagggtaaaaacgaaagggggcaacatttagttgccccgagattgctaacaaagtgcgcgttgttcatgccggatgcggcgtgaccgccttatccggcctacgaaaccgcaagaattcaatatattgcaggagcggtgtaggcctgataagcgtagcgcatcaggcagttttgcgtttgcccgcaaccttaggggacatttagcgaccccatttatttctcacttttccgcctcatcatcgcgcgttaatttcttttcataatcacgctttacaatatccagcgcgcgcagcacggtactggcagggatctgattttcctccagcagcacaatcaaatcgacagccagtttgacatcgtcaggggcattttccagtgacatattctctccattgctagcgggttaaacgcgctaacctgttttcgattttttccagcgcatggcggcagcgtgccaggcgcgcttcataggcttccacttcacgatgcagcgtttgctgttccacgagatcggtcacccgcgccagacgggctctgcgttcggcaaccatctcacgtagccgccgctcaaaatcctgatgctgaatacgtttacgctgccagcgggcaattttcggtggtgcactgtcccactcgcgcaatgaccaggcggaggcttcacgcgcgatggcttccagttgtgccgccagatgttccgccagccaggccacttgcggcagctgttgctgctcaactgcatgacgaagcgcagccagattatcgcccgcctcgtcgagacaagcctgtagtgttgtcgcacgagtctgaaaaagatgcctgtcgaaacgagcacttagcgtggcgaactgtgacaccggggcacaacgctgacgcagcgtagcgagctgtccttccagtttttccagcagcagggcggttttcacgataagacctcaatgaaaatgataattgttatgctaaagtagccactctgtaagctgacaacactcaatatgcaacgaatcattttaatcatcattggctggctggcggtagtgctgggtacgctgggcgtggtattaccggtattaccgacgacgccgtttatcctgctggcggcctggtgctttgcccgttcttccccgcgctttcacgcctggttgctgtaccgctcatggtttggcagctatctacgtttctggcagaaacatcatgcgatgccgcgcggcgtcaaaccgcgggcgattttgcttattttgctcacgtttgccatttctctgtggttcgtccagatgccatgggtgcgcatcatgttgctggtaattctcgcctgtttgcttttctatatgtggcgaattccggtgattgatgaaaagcaagaaaagcactgaagcacaacaatcgcagttgcaattattgcgtacagccagtacattctggcgttttcgagcacaggcgcaggcggtcaaaggttaaacaactgttacttttgatacgtttaaaacgcgccgtgagtaccaccgtaacaagcaggcatacacttatgaccgcgactgcacagcagcttgagtatctcaaaaatagcatcaaaagcattcaggactacccaaaacccggcattcttttccgcgatgtcaccagcttactggaagacccgaaagcttacgctctcagcatcgacttgctggttgagcgttacaaaaatgcgggcattaccaaagttgtcggcaccgaagcgcgtggcttcttgtttggcgctccggtagctctgggtctgggcgttggctttgtaccggtccgtaaaccgggcaaactgccgcgtgaaaccatcagtgaaacttacgacctggaatacggcaccgatcagctggagatccacgttgatgccatcaaaccgggcgacaaagttctggtggtggacgacctgctggcaaccggcggcactatcgaagcgaccgttaaactgatccgtcgtctgggtggtgaagtggctgacgctgcgttcattatcaacctgttcgatctcggcggcgaacagcgtctcgaaaaacagggcattaccagctacagccttgtcccgttcccgggccattaattatcgccagtcttgtgctgcccacgctacggacagcacaagatgtgcattcagcctcgccgttctgacggggctgtgttagcattaccccttcgtgaatccaccttccagcgtttcagagcctgccaatgagttatcaggtcttagcccgaaaatggcgcccacaaacctttgctgacgtcgtcggccaggaacatgtgctgaccgcactggcgaacggcttgtcgttagggcgtattcatcatgcttatcttttttccggcacccgtggcgtcggaaaaacctctatcgcccgactgctggcgaaggggctaaactgcgaaaccggcattaccgcgacgccgtgcggcgtgtgcgataactgtcgtgaaatcgagcaggggcgctttgtcgatctgattgaaatcgacgccgcctcgcgcaccaaagttgaagatacccgcgacctgctggataacgtccagtacgctccggcgcgtggtcgtttcaaagtttatctgatcgacgaagtgcatatgctgtcgcgccacagctttaacgcactgttaaaaacccttgaagagccgccggagcacgttaagtttctgctggcgacgaccgatccacagaaattgccggtgacgattttgtcacgctgtctgcaatttcatctcaaggcgctggatgtcgagcaaattcgccatcagcttgagcacatcctcaacgaagaacatatcgctcacgagccgcgggcgctgcaattgctggcacgcgccgctgaaggcagcctgcgagatgccttaagtctgaccgaccaggcgattgccagcggtgacggccaggtttcaacccaggcggtcagtgcgatgctgggtacgcttgacgacgatcaggcgctgtcgctggttgaagcgatggtcgaggccaacggcgagcgcgtaatggcgctgattaatgaagccgctgcccgtggtatcgagtgggaagcgttgctggtggaaatgctcggcctgttgcatcgtattgcgatggtacaactttcgcctgctgcacttggcaacgacatggccgccatcgagctgcggatgcgtgaactggcgcgcaccataccgccgacggatattcagctttactatcagacgctgttgattggtcgcaaagaattaccgtatgcgccggaccgtcgcatgggcgttgagatgacgctgctgcgcgcgctggcattccatccgcgtatgccgctgcctgagccagaagtgccacgacagtcctttgcacccgtcgcgccaacggcagtaatgacgccaacccaggtgccgccgcaaccgcaatcagcgccgcagcaggcaccgactgtaccgctcccggaaaccaccagccaggtgctggcggcgcgccagcagttgcagcgcgtgcagggagcaaccaaagcaaaaaagagtgaaccggcagccgctacccgcgcgcggccggtgaataacgctgcgctggaaagactggcttcggtcaccgatcgcgttcaggcgcgtccggtgccatcggcgctggaaaaagcgccagccaaaaaagaagcgtatcgctggaaggcgaccactccggtgatgcagcaaaaagaagtggtcgccacgccgaaggcgctgaaaaaagcgctggaacatgaaaaaacgccggaactggcggcgaagctagcggcagaagccattgagcgcgacccgtgggcggcacaggtgagccaactttcgctaccaaaactggtcgaacaggtggcgttaaatgcctggaaagaggagagcgacaacgcagtatgtctgcatttgcgctcctctcagcggcatttgaacaaccgcggtgcacagcaaaaactggctgaagcgttgagcatgttaaaaggttcaacggttgaactgactatcgttgaagatgataatcccgcggtgcgtacgccgctggagtggcgtcaggcgatatacgaagaaaaacttgcgcaggcgcgcgagtccattattgcggataataatattcagaccctgcgtcggttcttcgatgcggagctggatgaagaaagtatccgccccatttgatcgtaagcacagcttacgttcgtcatccttaacgtgattgagagagaaacctatgtttggtaaaggcggtctgggtaacctgatgaagcaagcccagcagatgcaagaaaaaatgcagaaaatgcaggaagagatcgcgcagctggaagtcaccggcgaatctggcgcaggtctggtaaaagtgaccatcaacggtgcacacaactgccgtcgcgtagagatcgacccgagcctgctggaagacgacaaagagatgctggaagacctggtggctgcagcattcaacgacgcagcacgtcgtattgaagaaacgcagaaagaaaaaatggcctctgtatcctccggaatgcagctgccgcctggctttaagatgccgttctgatgcaaaccagcccgctgttaacacagcttatggaagcactgcgctgtctgccgggcgttggcccgaagtcggcgcagcgtatggcgttcacgctgcttcagcgcgatcgtagcggcgggatgcgtctggcgcaggcgctcacccgggcgatgtcggaaatcggccactgcgccgattgccgcactttcaccgaacaggaagtctgtaacatctgttcgaatccgcgtcgtcaggaaaacggtcaaatctgcgtggtggagagtccggcggacatctacgccattgagcagacggggcagttttcaggtcgttattttgtgttgatggggcatctgtcaccgctggacggcatcggtccggatgatatcgggcttgatcgtctggaacagcgtctggcagaggaaaaaatcactgaagtgatcctcgccaccaaccccacggttgaaggtgaagctaccgctaactacattgccgagctttgcgcgcaatatgacgtggaagccagccgaatcgctcatggcgttccggttggcggcgagctggaaatggtcgacggcaccacgttgtcacactcccttgccgggcgtcataagattcgtttttaagcaaacgagagcaggatcacctgctctcgcttgaaattattctcccttgtccccatctctcccacatcctgtttttaaccttaaaatggcattattgaggtagacctacatgaaaggacaagaaactcgtggttttcagtcagaagtgaaacagcttctgcacctgatgatccattctctctattccaataaagaaatcttcctgcgtgagcttatctctaacgcctccgatgcggcggacaagctgcgtttccgtgcgctctctaacccggacctgtacgaaggtgatggcgaactacgcgttcgtgtctctttcgataaagacaagcgtacgctgaccatctccgataacggcgtggggatgacccgcgacgaagtgattgaccatctggggactatcgctaaatccggtaccaaatcattcctcgaatccctgggttctgaccaggcgaaagacagccagctgatcggtcagtttggtgttggtttctactctgcgtttatcgtggccgacaaagtgaccgtgcgtactcgcgcggcaggcgaaaaaccagaaaatggcgtcttctgggaatcggctggcgaaggtgaatacaccgttgccgacatcaccaaagaagatcgtggtactgaaatcaccctgcatctgcgtgaaggcgaagacgagttcctcgatgactggcgcgtgcgttccatcatcagcaaatactccgaccatatcgcgctgccggtagagatcgaaaaacgcgaagagaaagacggcgaaaccgttatctcctgggagaaaatcaacaaagcgcaggcgctgtggactcgtaacaagtcggaaatcaccgatgaagagtacaaagagttctacaaacacatcgcccacgactttaatgatccgctgacctggagccacaaccgtgttgaaggtaagcaggagtacaccagcctgctgtacatcccgtcccaggctccgtgggatatgtggaaccgcgatcataaacacggcctgaaactgtatgttcagcgtgtgttcatcatggacgacgcagaacagttcatgccgaactatctgcgcttcgtgcgtggtctgattgactccagcgatctgccgctgaacgtttcccgtgaaatcctccaggacagcacggtaacgcgtaacctgcgcaatgcgctgaccaagcgtgtgctgcaaatgctggaaaaactggcgaaagacgacgcggaaaaataccagaccttctggcaacagtttggcctggtactgaaagaaggtccggcggaagatttcgctaaccaggaagcgatcgccaaactgctgcgttttgcttctacccataccgattcttctgcgcagaccgtatctctggaagactacgtttcccgcatgaaagaagggcaggagaaaatctactacatcaccgcagacagctatgcggcagcgaagagcagcccgcacctggaactgctgcgtaagaaaggcatcgaagttctgctgctttccgaccgcatcgatgagtggatgatgaactatctgactgagttcgacggtaaaccgttccagtcggtgtctaaagttgacgagtcgcttgaaaaactggctgacgaagttgatgagagcgcgaaagaagcggagaaagcactgactccgttcatcgaccgtgtgaaagccctgctcggcgagcgcgtgaaagatgtccgtctgactcaccgtctgaccgatacgccagcgatcgtttcgaccgacgcggacgaaatgagcactcagatggcgaaactgttcgctgcggcgggccagaaagtgccagaagtgaaatacatcttcgaactgaacccggatcacgtactggtgaaacgtgcggcagatactgaagatgaagcgaagttcagcgagtgggtagaactgctgctggatcaggcgctgctggcagaacgcggcacgctggaagatccgaacctgtttattcgtcgtatgaaccagctgctggtttcctgatgtaatgccggatgaccttcgtgtcatccggcatttttcttttcatcatctgcactttccgcaaattatctcgccattaaccgtttcagccccaggtgcctttcttgaggcaatcgcctgttggtggtatcgtttatcgctttttcaaaaaattcgacacattttaaggggattttcgcaatgcgtatcattctgcttggcgctccgggcgcggggaaagggactcaggctcagttcatcatggagaaatatggtattccgcaaatctccactggcgatatgctgcgtgctgcggtcaaatctggctccgagctgggtaaacaagcaaaagacattatggatgctggcaaactggtcaccgacgaactggtgatcgcgctggttaaagagcgcattgctcaggaagactgccgtaatggtttcctgttggacggcttcccgcgtaccattccgcaggcagacgcgatgaaagaagcgggcatcaatgttgattacgttctggaattcgacgtaccggacgaactgatcgttgaccgtatcgtcggtcgccgcgttcatgcgccgtctggtcgtgtttatcacgttaaattcaatccgccgaaagtagaaggcaaagacgacgttaccggtgaagaactgactacccgtaaagatgatcaggaagagaccgtacgtaaacgtctggttgaataccatcagatgacagcaccgctgatcggctactactccaaagaagcagaagcgggtaataccaaatacgcgaaagttgacggcaccaagccggttgctgaagttcgcgctgatctggaaaaaatcctcggctaattcgaaagcgcgcacggacagtcccctcgccccctcggggagagggttagggtgaggggaacaggcccgcacaagcaaacttatcagcaatctcaggccggatattcattcggccttttacaaaaacctcaatctgcgctattcctttttctgatttgacctctcacagcaattagttcttcttcctcacttttccgctacaattatcaacaagttgaatcgataagaggcggtaatgcgtcagactaaaaccggtatcctgctggcaaacctgggtacgcccgatgcccccacacctgaagcggtaaaacgctatctgaaacaatttttaagcgacagacgcgtggttgatacctcacggttgttatggtggccattgctgcgcggcgtgattttgccgctgcgctcgccgcgtgtggcgaagctgtatgcctctgtctggatggaaggtggctcgccgctgatggtttacagccgccagcaacagcaggcgctggcacaacgtttaccggagatgcccgtagcgctgggaatgagctacggctcgccatcactggaaagcgccgtagatgaactcctggcagagcatgtagatcatattgtggtgctgccgctttatccgcaattctcctgttctacggtcggtgcggtatgggatgaactggcacgcattctggcgcgcaaacgtagcattccggggatatcgtttatacgtgattacgccgataaccacgattacattaatgcactggcgaacagcgtacgcgcttcttttgccaaacatggcgaaccggatctgctactgctctcttatcatggcattccccagcgttatgcagatgaaggcgatgattacccgcaacgttgccgcacaacgactcgtgaactggcttccgcattggggatggcaccggaaaaagtgatgatgacctttcagtcgcgctttggtcgggaaccctggctgatgccttataccgacgaaacgctgaaaatgctcggagaaaaaggcgtaggtcatattcaggtgatgtgcccgggctttgctgcggattgtctggagacgctggaagagattgccgagcaaaaccgtgaggtcttcctcggtgccggcgggaaaaaatatgaatatattccggcgcttaatgccacgccggaacatatcgaaatgatggctaatcttgttgccgcgtatcgctaaagctgagcggtaaagaactgagcgccgtcgcgaagagcctcgtcggcggttttcatcatccgtgaataatgcaaaaaggcgtgcagcgtgcctgggtagagtttgaactcacagggctgctgatgcgccgctaacgtctggtaaagcagacggctgtcatccagcagcggatcgaactccgccccggcaataaaacagggcggaacttcgcgagtgagatcattattaaacagacagtaatacggcgactcgcggtccgcgtcgttgcttaaatatgcctcttcgtacatctgcaaatcctgttgcgttaagccatcccagacaccgcccaacagacgacgagtcacggaatcccgtaatccgtaaagcccataccacagcaaaacgcccgcaactttaccgcaatcgatctgtttatcacgcaaccacaacgcactggcgagcgccagcatggcacctgcggaatcaccggcaaagccaatgcgggacatattgatttgataatcctccgcctgctggtggaaataacaacaagcagccacaatttcctctatcgcttgcggaaaacgcgcttcaggtgaaagggtgtaatcaataccaatcaccgtacattggctgtagcttgccagcaggcgcatgatgcgatcgtgggtatcgagattgccgagaataaaaccgcctccatgcaaataaaatagcgtcgctgggctatctggctgcggacaaaagagacgtgtttccacctgcccatattttgttggaaccatgtaagctctggttgccatttctggagcgcccgcattccagaatcggcgctcaagcgtgtaatactgtcgttgctcagcaatcgttcccgttgcgggccagggcggtaaatccggctgaagagtattcacaacggtcttcatttcagcagaaataaggtccagaacaggtagtttgttttccggcttcatacaaaaactcctttcaaattacgtcattgtaaggaaccactgccatgaaaatgcgatcccgcctgctgatattgaaactggctgcgtctcgcgcgctcccgtcagattgtgttaacattcgccgctcagttaaccacccgtaaaaacaaccatgaaatttcccggtaaacgtaaatccaaacattacttccccgtaaacgcacgcgatccgctgcttcagcaattccagccagaaaacgaaaccagcgctgcctgggtagtgggtatcgatcaaacgctggtcgatattgaagcgaaagtggatgatgaatttattgagcgttatggattaagcgccgggcattcactggtgattgaggatgatgtagccgaagcgctttatcaggaactaaaacagaaaaacctgattacccatcagtttgcgggtggcaccattggtaacaccatgcacaactactcggtgctcgcggacgaccgttcggtgctgctgggcgtcatgtgcagcaatattgaaattggcagttatgcctatcgttacctgtgtaacacttccagccgtaccgatcttaactatctacaaggcgtggatggcccgattggtcgttgctttacgctgattggcgagtccggggaacgtacctttgctatcagtccaggccacatgaaccagctgcgggctgaaagcattccggaagatgtgattgccggagcctcggcactggttctcacctcatatctggtgcgttgcaagccgggtgaacccatgccggaagcaaccatgaaagccattgagtacgcgaagaaatataacgtaccggtggtgctgacgctgggcaccaagtttgtcattgccgagaatccgcagtggtggcagcaattcctcaaagatcacgtctctatccttgcgatgaacgaagatgaagccgaagcgttgaccggagaaagcgatccgttgttggcatctgacaaggcgctggactgggtagatctggtgctgtgcaccgccgggccaatcggcttgtatatggcgggctttaccgaagacgaagcgaaacgtaaaacccagcatccgctgctgccgggcgctatagcggaattcaaccagtatgagtttagccgcgccatgcgccacaaggattgccagaatccgctgcgtgtatattcgcacattgcgccgtacatgggcgggccggaaaaaatcatgaacactaatggagcgggggatggcgcattggcagcgttgctgcatgacattaccgccaacagctaccatcgtagcaacgtaccaaactccagcaaacataaattcacctggttaacttattcatcgttagcgcaggtgtgtaaatatgctaaccgtgtgagctatcaggtactgaaccagcattcacctcgtttaacgcgcggcttgccggagcgtgaagacagcctggaagagtcttactgggatcgttaagttatcgtcggttcgtaggccagataaggcgttcacgccgcatctggcatttggctctcgatgcctgatgcgacgctggcgcgtcttatcatgcctacatatttttcatattttacatccggcaaccaccgtttaccccgtcaccacctcacccgccggtggcgtttccagcagttccagcatggtacgggcgatttcacgctcgcccatcactacctgattcgcaccacgttcggtgatatacgccacttcatcgtcataatgggcgcgggcaataatctcaatatccggatttttcgcgcgggcagatgccacaatctcacccgcttcataaccgttgggaatcgtcaggatcagccattttgcacattccagatgcgccagttgcataatttcttcgttcgccgcattgcccaatactgcgcggaccccgcgctctcgcagctcatcaacacgggttcgtgacgtctcaatcaccaccagcggaatatcagaggcgagcaatttctcccccagcaggctgcctacacgaccgtaacccaccagtagcgcatggttgcaaatatccactgggatctgcttctcttcttcgattgcctcttccagcgtctgctcttccagcgtttcggtcttcgccagatatttctccagtagtgcgaacagtaccgggttgagcataatcgacaggatcgcccctgccagtaccaggttttgtccggcctgcggcagtaaattcaatgccattcccagtcccgccaggataaacgcgaactcaccaatctgcgccaggctggcggcgatggttaatgccgtacgttgggagtgaccaaacagtcgcaccaggaaaaatgcggctaacgacttaccaaacagaataatcgccagcgtcgccagcactgccagcggttgctgaatcagaattaacggatcaaacaacatcccgacggagacaaaaaacagcaccgcaaacgcgtcgcgcaatggcagcgtatcgtgggcggcacggtgactcagttcagactcgttcagtaccatcccggcaaagaacgcaccgagtgcaaaggagacatcaaacagctctaccgcaccaaaggcaacccctaacgccagcgccagcaccgacagggtaaacagctcgcgagaaccggttgccgcgctgcgtgccataatccacggcaccagacggcgacctaccagcatcataatggcgataaatgcgatcactttgccgatggtgatccccatatcgactgcaagagtggcaaagcccacatcgccctgttccatcattcctgccactgcgggcagcaacaccagcgtcagaaccattaccaggtcttccacaatcaaccaaccgatggcgatttgcccacgctgactgtcaattaattgccgttcttcaagtgcgcgcagtaacaccacggtactggcggtggaaagacataaaccgaacacgataccggtcattaacgaccagcccagcacggcagagagcgccatacccagcagcgtcgccacggctatctgggcgatcgcaccgggaatggcgatggcctttaccgccatcaaatccttcagcgaaaagtgcaaaccgacgccaaacatcaacagaatgacgcccagttcagccagttccggggcaagcttggtatcggcaacaaagcccggagtgaatggtcctgccagcacacccgctaacagatatcccaccagaggagaaatacgtagtttattggccagcatgccgaggataaaggcgagcacaaggccgccaacaatggtggtgataagcggggtggcgtgatgcattccgtctccttttcctggtggttattgtccatttttggccgggaaaaccaaaattacaggtaatagtttatgacaatttcattgatgatgttcatgaataattattgaattttgcagaaaaatggaattagctgcaaaaaaagcacggatcggaaaacagaaggcggtttaacagaggaaaggcttatggcgactgtaaaacgatgcagccaaagtttgcctttggctgcaatgaaatcagtctttatgccggttatcaggcaggaatatggtcaacatccccaatagtggcaggaaagcacagattttatagactaactcgatgctggtgtgatcggcgataagccccagaactgccgctcccagacctcccatgccaaaagcaaaaccgaaaaagagtccagaaaccataccgatacgtcctggaagcagctcctgagcgtagaccagaatggcagagaatgccgaagcgaggataaatccaataatcaccgttaaaacccccgtccagtgcaggctggcgtagggtaaaatcagcgtaaacggcgcaacgccgaggatagagccccaaatcacatatttccgcccaattttatcccctacaggcccgccgatcaccgtacctgccgcaacggcaaacaggaaggcaaacagatgaagctgagcattctggatagataatccgaatttttgcatcagataaaaggtgtaatagctgctgatgctcgccatatagaaatatttcgagaaaatgaggattaacagaatgctgaccgccagtacaactttattgcgcggcagtggattgataatcgtcgctttgggttttcctttattcattcggtgctgtgccgagtaccaacggctgatttgcgccaacaccacgatcgccagcagtgccgcaagcacaaaccaggcaacgttgcctttgccataaggcgcgataatcaccgccgccagcaagggtcccagggaactgccaaagttgccgccgacctgaaagatagattgcgccaggccatgccgcccgccggaagccatacgggccacgcgagaagattccggatgaaagaccgatgaaccggtaccgaccagcgccgccgccagcagaactgcgccaaaactgcccgccagcgcaagcagcaccagaccgcttaaggtaaagcacatgccaattggcaacgaccatggcatcggatatttatcggtccagtagccgaccactggttgcagtagcgaagaggcgagctggaaggtgagggttatcatgccaatctgcataaatgtcagagaaaattctgactgaagcagcggataaatcgccagaatcagcgattggatcatgtcgttcagcagatgtgagaggctgatagcacctaaaataccaaacgatgttcgggccttggtcgttgacgcagccgcgcccgccacaggctggggttgttcactcattgccataggaaagtcactttttcagggttgcgatgtaaagaatgatcttatttgtgattattaccagactaacatacctgtatgcgtcgtctgaaggaagtctcaacgccgaatacagaatttctaatctggatgcagatttatcttcaccggacgcagacttgtctatgatgtcgcgtcatactatttttcaacacgttgaaatcaggtcagggagagaagtatgaaattattgcagcggggcgtggcgttagcgctgttaaccacatttacactggcgagtgaaactgctctggcgtatgagcaggataaaacctacaaaattacagttctgcataccaatgatcatcatgggcatttttggcgcaatgaatatggcgaatatggtctggcggcgcaaaaaacgctggtggatggtatccgcaaagaggttgcggctgaaggcggtagcgtgctgctactttccggtggcgacattaacactggcgtgcccgagtctgacttacaggatgccgaacctgattttcgcggtatgaatctggtgggctatgacgcgatggcgatcggtaatcatgaatttgataatccgctcaccgtattacgccagcaggaaaagtgggccaagttcccgttgctttccgcgaatatctaccagaaaagtactggcgagcgcctgtttaaaccgtgggcgctgtttaagcgtcaggatctgaaaattgccgttattgggctgacaaccgatgacacagcaaaaattggtaacccggaatacttcactgatatcgaatttcgtaagcccgccgatgaagcgaagctggtgattcaggagctgcaacagacagaaaagccagacattattatcgcggcgacccatatggggcattacgataatggtgagcacggctctaacgcaccgggcgatgtggagatggcacgcgcgctgcctgccggatcgctggcgatgatcgtcggtggtcactcgcaagatccggtctgcatggcggcagaaaacaaaaaacaggtcgattacgtgccgggtacgccatgcaaaccagatcaacaaaacggcatctggattgtgcaggcgcatgagtggggcaaatacgtgggacgggctgattttgagtttcgtaatggcgaaatgaaaatggttaactaccagctgattccggtgaacctgaagaagaaagtgacctgggaagacgggaaaagcgagcgcgtgctttacactcctgaaatcgctgaaaaccagcaaatgatctcgctgttatcaccgttccagaacaaaggcaaagcgcagctggaagtgaaaataggcgaaaccaatggtcgtctggaaggcgatcgtgacaaagtgcgttttgtacagaccaatatggggcggttgattctggcagcccaaatggatcgcactggtgccgactttgcggtgatgagcggaggcggaattcgtgattctatcgaagcaggcgatatcagctataaaaacgtgctgaaagtgcagccattcggcaatgtggtggtgtatgccgacatgaccggtaaagaggtgattgattacctgaccgccgtcgcgcagatgaagccagattcaggtgcctacccgcaatttgccaacgttagctttgtggcgaaagacggcaaactgaacgaccttaaaatcaaaggcgaaccggtcgatccggcgaaaacttaccgtatggcgacattaaacttcaatgccaccggcggtgatggatatccgcgccttgataacaaaccgggctatgtgaataccggctttattgatgccgaagtgctgaaagcgtatatccagaaaagctcgccgctggatgtgagtgtttatgaaccgaaaggtgaggtgagctggcagtaatccgaaagtgccggatgtttgcatccggcacaatgcttaatcgcggcgggcgatatcagcaaatttggcatcgaggatctttgccagatcgcctgccgccagttcgatatccagtccgcgcttgccgccggaaacataaatagtggcaaattcttgtgcgggggcgtcgataatcgttggcagacgttttttctgccccagtgggctaatccccccaaccaggtatcccgtcgaacgctgcgcgaccatcggatcggccatctcaactttcttggcacccagcgcttttgctacttttttaagatccagttgacctgcgaccggcgtaacggccacggcaaggtgtttcatatcaccgttcactgccaccagcagcgttttgtagacctgatccggattcaaacctaattttttgacgacttcatcgccaaaattggtttcagccggatcgtgctcgtaggtatggatttgaaacgaaatcttgtttttttcgagtaatttaactgcgggtgtcatggtaattttcctgccttaaacaaaaaaacgaagcaagcatacgcctgatggcggtccaaaaaaaagagtcatcttgcctaagagtattggcaggatggtgagattgagcgacaatcgagttacaccgtcgcttaaagtgacggcataataataaaaaaatgaaattcctctttgacgggccaatagcgatattggccatttttttagcgcaacatttgcggcaaattcccttctccatacaggtgtagtgcaccgaccgcgaccacatatcgccccggcggcatggcgcgtaatttatcccgccaggcgagatttcgctgatgcatcagcacatcgtacagcgactgactgaacgtattgggcagcgttatatcattattttgcggcggtgcattcagccaccagctcatcatttgttgcagcaaccgtgcgttggtatgccagtgggtcagcgtatcgtccagcagcgccagtcctttgtcagggagctggagcaacatggcaatctggttttcagccccttccagttcaatcacgggtttatgttgttgcttcgccgcctgcaatagctggtaatcgataccgtattctgcccgcagccccagtttttgtgcctgcgtcgcctgaagaaccatcgcgatttgccacagcggttgggtagaaaagagtgagggagaaatgcccatctcctggctaatgtgctgcaggttttggagttgctcctcgctaatgcgctcttccagcgcctcgcaggcaggcaaattagcaaaaggcgtatcgctggtggaaacatccgcctcgacgatcagcgcatcggcgtttttgagctttttgagcaaacgggtgggcaggggagccatatcgtggctacccatatgaatactgccaatcagatgaaaatggcgattgccggggagggtgatatcgatggcaggccaggtgtaatgattaccgcgcagcgcggcccaaagcgtttttacccggtacaacagatccatacgacctccctttgtgaaatatcatgctagcgcgcggtgagggatggcgcaaatggagttggagacttgtttaatgtgtttgtatgattcagtatgttcttgcatcgctattcacaaggaagcaacagttaaaaaccatgaaacaggcaacaagaaaaccgacgacacccggagatattcttctctatgaatatctggaaccgctcgatttgaaaatcaatgagttagcagagttgctgcatgttcatcgtaatagcgtcagtgcactgatcaataacaatcgtaaactcactactgagatggcatttcgtctggcgaaagtttttgataccacagtcgatttttggctaaacctccaggcggcggttgatctttgggaagttgaaaacaacatgcgcacccaggaagaattgggacggattgaaacagtggctgaatatttggcacgccgtgaagagcgtgcaaaaaaggtcgcgtaaggccaaaacatcgcttcatctcgtaggccggataaggcgttcacgccgcatccggcatccgagcaccattgcctgatgcgacgcttacccgtcttatcaggcctacaaacttgtgcctgaaccgtaggccggataaggcgtttacgccgcatccggcatccgagcaccattgcctgatgcgacgcttacgcgtcttatcaggcctacaaacctgtgcctgaaccgtaggccggataaggcgtttacgccgcatccggcagtcatgcgtcgatgccaaatgcgccaccctaaagcagcgcatccgcaatgatgtacttattccttcggtttaaaccgcagcaaccggttggcgttactcactacggtaatcgacgagagcgccattgccgctccggcaactaccgggttaagcagtgttccagtgaacggccacaaaataccggcggcgaccggaataccgatactgttgtagataaacgcaccgagcaggttctgcttcatgttgtgcagcgttgcgcgggaaatagcgagcgcatccgcaacgcccatcaggctatggcgcatcagggtaatcgccgcggtttcaatggcaacatcactgccgccacccatcgcaatgccgacatccgcctgagccagcgctggcgcgtcgttaatgccgtcgcccaccattgccacctgacgtccttcactttgcagatgtttgatcgcttcggctttaccgtccggcagcaccccggcgatcacctcatcaatccctgcttctttggcgatcgcattggcggtggttgggttatccccggtcaacatcaccagacgatatcccgctttatgcaggcgttgcagcgccgccacgctatcactacgcaacggatcgcgtactgccagcagggctaccgctttcccgtcaaccgccagcagcacaggcgttgccccttgcgatgcctgagcagtaatctccgcttcgatagctttggtaccaacctgttgctcatttaacagcgcctgattgcccagcaataacgcatgaccttcagcttcaccgctcacgcccagcccgcgcaatgtgcggaaaccgttgacctgcggtagctgcatatcacctgctttatcgaggatcgctcgtgccagcggatggctggaaccttgctccagtgccgccgccagacgcaatgcctgcgcttcatcaacatcagcaaatgttttcactgcgacaacctgcggcttcccttcagtcagcgtcccggttttatcgaacactacagtgtcgagtgtactggcgcgttgcagcgcgtcagcgtcccgcaccagcacgccaaactcagccgcccgcccgacgccggaaataatcgacatcggcgtcgccagccccagcgcacacggacaggcaataatcagtaccgtggtggcaatcaccagggtatagacaatctgcggtgccggaccaaagaaataccagattgccgcactgacaagcgcaataaccaccactaccggcacaaatacggctgagattttatccgccagctgaccgatttctggcttgctgctctgggcctggcgcaccatgcgaatgattcgtgacagcgtagtatggctgccaaccgcactggcacgaaacagcacactgccgtcctgtaccactgtcccggcatggacgctatcgccttcgcctttttgctgcgggattggttcgcccgtcagcatcgcttcatccagccatgcttcgccctgggtaatctcgccatctaccggcacgcgatcgccggtcgtcaggcgcagcaacatacctggctgcacttctgccagaggcacgcttttttcaccttcgtcagtaaccaggcgtgccgtcggcggggttaaatcgagtaacttttccagcgccttagaagaacgctggcgtgcgcgcgcttccagcatatggccgagattgatcagaccgataatcatcgcgctggcttcgtaataaagatgtcgcgcttccatcgggaaccactgcggccacaggttgacgctcatcgaatagagccacgccacgccagtacccagcgccaccagcgtatccatcgtcgccgcaccgttcagcaggcttttccatgcactgcggtaaaaatggccgccggcgaaaaccatcactgccagggttatcaggccgataaccaaccacaggctgcggttgtcagcggtgaccatcatgttatcgccgatcatcccccagaccatcaccgggatacccaccgccagtgcgacaattgcctgccagcggaagcgcttcatcgtagcgacggcggtttcttgctggcgctcgcggcgtttagcgtcatcttcaatcgcttccgcgccgtagcccgctttttccaccgcctgcactaaatcttgtggggaggcactgcccatcaccagcgcagtacgctccgccaggtttacccgtgcctgagtgacgcccggtacgctttgcagcgcattttgtacgcgggtgacacagctggcgcagctcatgccgctcagcagcaactgctggctgtcatcgtcatcggcggtcgctgccggaagcgcctcagaaaccgctgtcagtgcttccgacgggattgatgactccgccagcggtttagcctttgggtggcttacagatgcgtcataacccgcttgtttgatggtttcgatcagctgttctgcactggcagtcccggtaacgtgcgcttcagtgatagacacatccgcctgctcaacatccggacgctgttcaagactttctttcacgcgtttaacgcagtgaccgcaggacaggccgtccagggtcaggtcgatagtttgtgacataaaacactcctttaagacagttttgactggctgtgataaaggttaaaccttccagcaaggggaaggtcaagaaattaataaaccaggcgggtaaaagtccgtaaagattaaaaaatcggctcgatttgcatcaggattagacatttatctctttgttttcctgtagttaagttgcgggtgctaagttaaatcaggatgcctgaaaatcggcaccggggtgaggaattacctcccgcatctataaaaaggagttaacaaaagatgttagatgcaaacaaattacagcaggcagtggatcaggcttacacccaatttcactcacttaacggcggacaaaatgccgattacattccctttctggcgaatgtaccaggtcaactggcggcagtggctatcgtgacctgcgatggcaacgtctatagtgcgggtgacagtgattaccgctttgcactggaatccatctcgaaagtctgtacgttagcccttgcgttagaagatgtcggcccgcaggcggtacaggacaaaattggcgctgacccgaccggattgccctttaactcagttatcgccttagagttgcatggcggcaaaccgctttcgccactggtaaatgctggcgctattgccaccaccagcctgattaacgctgaaaatgttgaacaacgctggcagcgaattttacatatccaacagcaactggctggcgagcaggtagcgctctctgacgaagtcaaccagtcggaacaaacaaccaacttccataaccgggccatagcctggctgctgtactccgccggatatctctattgtgatgcaatggaagcctgtgacgtgtatacccgtcagtgctccacgctcctcaatactattgaactggcaacgcttggcgcgacgctggcggcaggtggtgtgaatccgttgacgcataaacgcgttcttcaggccgacaacgtgccgtacattctggccgaaatgatgatggaagggctgtatggtcgctccggtgactgggcgtatcgtgttggtttaccgggcaaaagcggtgtaggtggcggtattctggcggtcgtccctggagtgatgggaattgccgcgttctcaccaccgctggacgaagatggcaacagtgttcgcggtcaaaaaatggtggcatcggtcgctaagcaactcggctataacgtgtttaagggctgatcatgatgaacacggaaggtaataacggtaacaaacctctcggtctatggaacgtcgtttccatcggcattggggcaatggtgggggcggggatcttcgcgctgctggggcaggctgcattgctaatggaagcctcgacctgggtcgcctttgcttttggcggtattgtggcgatgttttccggttatgcctatgcgcgtctgggggcgagctatcccagcaatggcggcattatcgacttctttcgtcgcggattaggcaacggcgtcttttcgctggcgctctcgttactgtacctgttgacgctggcggtgagcatcgccatggtcgcccgtgcttttggcgcttatgccgtgcagtttttgcatgaaggcagccaggaggagcaccttattttgctctacgcgttggggatcattgcggtgatgacgcttttcaactccttaagcaaccatgcggtagggcggctggaagtgatcctcgtcggcattaaaatgatgatcctgttattgctgattattgccggtgtctggtcgctgcaaccggcgcatatttccgtctctgcgccccccagctccggtgcgttcttctcctgtattgggataactttccttgcctatgcgggctttggcatgatggcgaacgcggcggataaagtgaaagatccgcaggtcattatgccacgggcgtttctggtggcgattggcgttaccacgttgctttatatctcgctggcactggttttgcttagcgatgtatcggcattagagttagaaaaatatgccgataccgccgtagcgcaggctgcttctccgctgctcgggcatgtgggttatgtgatcgtcgtcatcggcgctttactggcgacggcttcagccattaacgcgaacctgttcgccgtgtttaacatcatggacaacatgggcagcgaacgcgaactgccgaagctaatgaataaatccctgtggcggcagagtacctggggcaacattattgtcgtggtgttgattatgctgatgacggcggcactgaatttaggctcactcgccagcgttgccagcgccacctttttgatttgctacctggcggtgtttgtggtggcgatccgcctgcgtcatgatattcacgcctcgttgccgattcttatcgttggtacgttggtgatgttgttggtgatcgttggctttatctacagtctgtggtcccagggtagccgtgcgttgatatggattattggctcactcttactcagccttattgtggcaatggtcatgaagcgcaataaaaccgtataacatctctctgtgcgcagtacttcctgtattattgtggtggcggtcgatattcgcactggcaaaaaaacgtgcttgaatatctgttgaaaccctttaacaaagcacaggaggcgttgcgcgaacgatgaacatcagcgatgtagcaaaaattaccggcctgaccagcaaagccattcgcttctatgaagagaaggggctggtgacgccgccgatgcgcagcgaaaacggttatcgcacctacacgcagcagcatctcaacgaactgaccttactgcgccaggcacggcaggtgggctttaacctggaagagagcggcgagctggtgaatctgtttaacgacccgcagcggcacagcgccgacgtcaaacggcgcacgctggagaaggtggcggagatcgaacgacacattgaggagctgcaatccatgcgcgaccagctgctggcactggcgaatgcctgccctggcgatgacagcgccgactgcccgattatcgaaaatctctccggctgctgtcatcatcgggcagggtgattaagacgagacggctcggatatgtagggttatcccttctatcgcaatgacttcaacatgcgtacctgcaccgagatcctcgctggcgctgacaggccatgaactgtcaccgacgcgcatatgaccgcgcccgttgaccagcggagattccagcacaaaacgtcggccaatcagctgctgcccgcgctggtttaaatgactatcgctgtgcttttgttcgcgcacccgccgcgacaaccatttccaccacagccaggcggcgagcagcgtcaggatggcaaacattaccccttgccactcccaacccagcggcaccagccagaccaccaggccggtaatcaccgctgccacgccgctccacaacaaataaccatttccgcccagcatctcggctgccagcagcaaaccgccgagactgagccagaaaatatgtggatgaacgaccattaactccatcatggctgagtccgtttgttggcgctgtctttcaccagctcggcaatcccggcaatcgaccccatcaggctgctggcctctaatggcatcatcactactttgctgttactggaggaaccgatctgctgtaacgcttcggtgtatttctgcgctacgaagtagttcaccgcctgaatatcaccggaggcgatagcttcagacaccattttggtggcgcgggcttctgcttcggcggaacgttcacgcgcttcagcctgtaaaaacgccgactgacgttcgccttccgctttcaggatttgcgactgtttttcaccttcggctttgaggatttccgcctgacggatcccttccgcttcaagaatgtaagcgcgtttggtacgttccgctttcatctgcgcgttcattgaagagataagctctgccggtgggcgcacgtcgcgaatttcaatacgggtgactttaatcccccacgggttggtggcttcatcgacaatacgcagcaggcgtgagttgatgctgtcgcgctgagagagcatttcgtcaagttccattgaacccagcacggtacggatgttagtcatggtcaggttgatgatcgccagctccagattgctgacttcataagccgcgcgcggcgcgtcaatcacctgaataaagcacacggcgtcgatggtaacgttggcgttatctttcgagataacttcctgggaagggatatcgagcacttgctccatcatattgatcttgcgaccaatgcgatccataaacggcaccaccagactgagccccggctgtaacgttttggtatagcgaccaaagcgttctactgtccactgatagccctgcggtacgattttgacacccgcgccgacaatgaccagcgcgacaaaaatgagaatcgggataaagataagcatcggaaaaacctcctgttgtaccgtccataatcagcaaaattgctgcttgattaaacaaattatacctgattactgaaagagagttcccccttattcctgcgaaggataaactgtttttagtaaaaatcagaaaaagggaacagcgatgcaggaaaatagtcctttgcttcagctacaaaacgtaggatatctggcgggtgatgcgaagattcttaataacatcaatttttcgctgcgtgctggcgaatttaagttaattaccggtccttctggttgtggcaaaagtacgctgctaaaaatagttgcttcattgatcagcccaaccagcggaacgttactgtttgaaggtgaggatgtcagcacactaaagccagaaatctaccgccaacaagtctcttactgcgcccagacaccgacgctgtttggcgatacggtatacgataatctgatctttccctggcagatccgtaaccggcagcctgacccagccatttttctcgattttctcgaacgcttcgccttgccggacagcattttgacgaagaatatcgccgagctatctggtggtgaaaaacaacgcatctcattgattcgtaacctgcaatttatgccgaaggttttattgctggatgaaataaccagtgcgctggatgaaagtaataaacataacgtcaatgagatgatccatcgttatgtgcgcgagcaaaatattgccgtgctgtgggtgacacacgataaagacgaaattaatcatgcggataaagtgattacactgcaaccgcatgccggagaaatgcaggaagcacgctatgaactcgcataatattactaacgaatcattagcactggcattaatgctggtggtggtggcaatcttaattagccataaagaaaaactggcgctggagaaagatattctctggagcgtcgggcgagcgataattcagctgattattgtcggctatgtgctgaagtatattttcagcgtggatgatgccagcctgacattattgatggtgttatttatctgctttaatgcggcgtggaacgcgcaaaaacgcagtaaatatattgctaaagcttttatctcatcgtttattgccattacggtcggggcgggaattaccctggcggtgctgattctctcagggtcgattgaatttatcccgatgcaggtgatccctatcgccgggatgattgccggtaacgccatggtagcggtggggttgtgttacaacaatttagggcaacgggtcattagcgaacagcaacagattcaggagaaactgagtcttggtgcgacgccgaagcaggcttcagcgatattgattcgcgacagtattcgcgcggctttaattccgacggtcgattcagcaaaaacggttggcttagtgagtttaccaggaatgatgtccgggctgatatttgccgggattgatccggtgaaggcgattaaatatcagattatggtgacctttatgctgctctcaaccgccagcttgtcgaccattattgcctgctatttaacctatcgtaagttttataattcgcgccaccagttggtggtgacgcaattgaagaagaaatgatgcgatgccggatgcgcagcatcgcatccggcgttgtggttcatgtgccgatcaacggaatatcaatacaacaatgcatacagctggcggcgatacttcgacgccagtgcatcacccgtacccagcgcagcgaggatctcctggaacgttttacgcgtctgaccgtctgcggcggtgagatctttacgcagatgcccgaacagcaactccagcgcctcttcattgcgcccaacctgatgcagttgcagcgccagttgcgtcgccagtgcggcatcttctggattctccgccacctgctgttgcaactgttgaatttccggcgtatcagccgcctgcttcagcagttcgatttgcgccaccagcccctggtagcgggtgtcctgatcctgcaacggaatggttttcagcaccgcttccgcatcttcagaacggttcagcgcaatcagcgtttctgccagcagcaggccgatctccccgttctgattcgacaactgccaggcgtctttcagcaatggcagggcatcggtgtaattgctttcctgcatcagttgcatcgcctgctgcgctttcagctcttcttcgcgcggcagcactttatccagcagggcgcggatcgcctcttccggttgcggcccctggaagccatctaccggttgcccgttctggaacagatacacggtcggaatcgcacgcagaccaaactgcgcggcaatcatctgctccgcgtcgcagtccagcttcgccagaataaattgcccgttgtactgcgccgcgaggctttccagaattggggttaactgcaaacagtgctggctacgttcagaccaaaaatagaacagcaccggagtggtcatcgactgttcaagaacctgttgcaggttagattcgttaatgttgacaatattttctacggacatggagtcgctctctgttgtcgatattttctttgacatgggggcttaagcgcgcgcttcaactcacccctgcaatattttgtccatcacgcgccccggcagcaggcgcttaagcaccattaccgcccaggtcaccagcgtcaccggatagcgcatcttcggcttctcgctaataaaagcatggcgtactttgtccaccaccgcttccggtcccaacgtaaagcgggcggcgatgccgggattttcgactggtttatcactttgcgtctggttgacgttgtcggtgaagcgagtacgaatgggaccgggttcgatcaggctgactttaattccgctgtggcgcagctccatgcgcagtgcatctgaccacgcctccagcgcatatttactggccgcgtaagcgccacgacccggcgtggagattaatcccatcaccgatgatgtcatcacaatacgcccttcaccgtgcggtaacatcgcgggtaacaggcgcatggtgagctggtgtgcgccgaaaaagttggcggaaaactgctgttccatctgcgcacggctgatggtggaaagggggccatacatgccgaatccggcattgttaaagatcccatacagacaattatcggtcagggcgatcacctcgtcggctgcgcgatcaacactttctggtgaatccagatcgatcaacacgccggtaaatcccatgctgttcatgcgctcaacatcatccggtttccggcaacctgccagcacatgaaaaccctggcgttttaattcgagcgcgctttccaggccaattccactggaacatccggtaattaagaccgatttttgcataactttacctgtcaggatctccgttgctttatgagtcatgatttactaaaggctgcaactgcttcgccatccagtcggcaataaacggctgggcgtcgcggttgggatgaataccgtcatcctgcatccattgtggcttgaggtagacctcttccataaaaaagggcagcagcggaacatcaaactctttggcgagtttggggtaaatggcgctaaaggcttcattataacggcgaccatagtttgcaggcagacgtatttgcattaacaatggttcagcgttggcggctttgacatcctgcaaaatctggcgcagcgtttgctcggtttgctgtggctgaaaaccacgcaaaccgtcattgccgcccagttcaaccagcacccaacgcggctgatgctgtttcagcagagccggaaggcgcgccagtccttgttgcgaggtgtcgccgctgatgctggcattaactaccgacgttttactctgccacttatcattcaacaaggcaggccaggccgcgctggcagacattcgatacccggcgctcaggctatcacccagaatcaataacgtgtccgctgcggcggcacggaaggttaacaggaccaggaacaggaagggcaaatgccagcggaaaacattgttgaagttcatcatcttaagaagtccgtcggtcagggggagcatgaactctccatcctcaccggagttgagctggttgtcaaacgtggcgagaccatcgcactggtgggcgagtcgggatcgggtaagtcaaccttgctggcgatcctcgccgggcttgatgacggcagcagtggcgaagtgagtctggtgggacaaccgctacataatatggacgaagaagcgcgggcaaagttgcgcgcgaagcacgtcggctttgtttttcagtcatttatgttaattcctacccttaacgcgctggaaaacgtcgagcttccggctctgctgcgcggtgagagtagcgcggaaagtcgtaacggggcgaaagcgttgctcgaacagttagggctgggtaaacgtctggatcatcttccggcacagctttccggcggtgaacagcaacgagtggcgctggcacgagcctttaatggtcgacctgatgtgctgtttgccgacgaacccaccggcaaccttgaccgccagacgggcgataaaattgccgacctgctgttttccctcaaccgtgaacatggcaccacgttgattatggtgacccacgacctgcaactggcggcacgctgcgaccgctgcttacggctggtgaacgggcagttgcaggaggaagcatgattgcacgttggttctggcgcgaatggcgttcgccgtcgctattaattgtctggctggcgctaagcctggcggtggcctgcgtgctggcgctgggcaatatcagcgatcgcatggagaagggcttaagccagcaaagccgtgagtttatggcgggcgatcgggcgttgcgcagttcacgcgaagtgccgcaagcgtggctggaggaagcgcaaaagcgcggcctgaaagtcggcaagcagctgactttcgccacaatgacctttgcaggcgacacaccgcagctggcgaacgtcaaagcggtggatgatatctacccgatgtatggcgatctgcaaactaatccccctggcctgaaaccgcaggcgggcagcgtattgctggccccacgcctgatggcactgcttaacctgaaaacgggcgacaccattgacgtgggcgatgccaccttgcggattgccggagaagtgattcaggaaccggattccggttttaaccccttccagatggctccgcgtctgatgatgaatctggcggatgtcgataaaaccggagccgtgcagccggggagtcgggtcacctggcgttataaattcggcggcaacgagaaccagctcgacggctatgagaaatggttgttacctcagcttaaacccgaacaacgctggtacggtctggaacaggacgaaggcgcgctggggcgatcgatggaacgctcgcaacagttcctgctgctttcggcgcttctgaccttgctgctggcagtggcagcggtggcggtagcgatgaatcattactgtcgcagtcgctacgatctggtggcgatcctcaaaacgctgggggcagggcgagcgcaactgcgtaagctaatcgtcggtcagtggttgatggtgctgacgctttcagccgttaccggtggggccataggcctgttgttcgaaaacgtgttgatggtgctgctcaagcccgttctgcctgctgcactaccgccagccagcctctggccgtggctgtgggcgcttggcaccatgacggtcatctcgctgctggtggggctacgaccatatcgcttgttgctggcaacgcagcctttacgcgtattacgtaatgatgtggtagcgaacgtctggccgctgaagttttatctgccgattgtcagtgtggtggttgtgctgctgctcgccggattaatgggtggcagcatgctgctttgggcggtgctggcgggcgcggtagtactggctttgctgtgcggtgtgctgggctggatgctgctgaatgtacttcgccgcatgacgctgaaatcgctgcctctgcgcctggcggttagccgcctgttacgtcagccgtggtcaacgttaagtcagctttcggcattttcgctctcctttatgctgctggcactgctgctggtgttgcgtggcgatctgctcgaccgctggcagcagcagctacctccagaaagcccgaactactttttaattaacatcgccacagaacaggtagcaccgctaaaagcgttcctcgcggaacatcagatagtcccggaatcgttttatccggtggtgcgggcgcggctgacggcgattaacgataagccgacagaaggtaatgaagatgaggcgcttaaccgcgaactcaatcttacctggcaaaatacgcggcccgatcataatccgattgtcgccggtaactggccgccaaaagccgatgaagtgtcgatggaagaggggctggcgaaacgcttaaacgttgccctcggtgataccgtgacttttatgggcgatacccaggagttccgcgctaaagtgaccagcctgcgcaaagtggactgggaaagtctgcggcctaatttctattttattttccctgaaggggcattagacgggcaaccgcagagctggcttaccagtttccgctgggagaatggcaacggcatgttgacacaactcaaccgccagttcccgaccattagcctgttagatattggcgcgattttaaaacaggtcggtcaggtgctggagcaggtaagtcgggcgctggaagtgatggtggtactggtcaccgcctgcggtatgttgctgttgctggcacaggtgcaggtgggaatgcgtcagcgtcatcaggagctggtggtgtggcgcacactcggtgcggggaaaaaactgctgcgtaccacgttgtggtgtgagttcgccatgcttgggtttgtttccggcctggtggccgcaattggtgcggaaacggcgctggcagtgttgcaggcgaaagtgtttgattttccgtgggagccagactggcgattgtggattgttctgccgtgcagcggagcgctgctgctgtcgcttttcggcggctggctgggtgcgcgactggttaagggtaaggcgctgttcaggcagtttgcggggtgatgagagtaaataaggggcgttctggttgaatggaacgccttgtttaaattaattctacaatatgtttcattgatgatgttattgaattggtgatttcctatctttctattgctgatattaatctgaatcggtggagtttattgattttaaatatagccctacaaaaataactcagactaataaaatcataaatcatatgcgttgaatggatattatccatatagtgaatttgttgatgatgaattcatctgtgctaaaaatgttagtttaataaaatattgaaagtgacctgtaataacagttgttgttgattgagaacaaataagtttatgtgaaaaatatataaatacattagctggtcttgtgtgtcattttatttttttttgttgctaacacagggatatgaacaataactaaaagggcactttatatgagcggaaaaccagcggcgcgtcagggagatatgactcagtatggcggtcccattgtccagggttcggcaggtgtaagaattggcgcgcccaccggcgtggcgtgctcggtgtgtccgggcgggatgacttcgggcaacccggtaaatccgctgctgggggcgaaggtgctgcccggcgagacggaccttgcgctgcccggcccgctgccgttcattctctcccgcacctacagcagctaccggacgaagacgcctgcaccggtgggcgttttcggccccggctggaaagcgccttctgatatccgcttacagctacgtgatgacggactgatactcaacgacaacggcgggcggagcattcactttgagccgctgctgccgggggaggcggtgtacagccgcagtgagtcaatgtggctggtgcgcggtggtaaggcagcacagccggacggccatacgctggcgcggctgtggggggcgctgccgccggatatccggttaagcccgcatctttacctggcgaccaacagcgcacaggggccgtggtggatactggggtggtctgagcgggtgccgggtgctgaggacgtactgccagcgccgctgccgccgtaccgggtgcttaccgggatggcggaccgcttcgggcggacgctgacgtaccggcgtgaggccgccggtgacctggccggggaaatcaccggcgtgacggacggtgccgggcgggagttccgtctggtgctgaccacgcaggcgcagcgtgcggaagaggcccgcacctcttcgctatcttcttctgacagttcccgccctctctcagcctcagcgttccccgacacactgcccggtaccgaatacggccccgacaggggtatccgcctttcggcggtgtggctgatgcacgacccggcatacccggagagcctgcccgctgcgccactggtgcggtacacgtatacggaagccggtgaactgctggcggtatatgaccgcagcaatacgcaggtgcgcgctttcacgtatgacgcgcagcacccgggccggatggtggcgcaccgttacgcgggaaggccggagatgcgctaccgctacgacgatacggggcgggtggtggagcaactgaacccggcagggttaagctaccgctatctttatgagcaggaccgcatcaccgtcaccgacagcctgaaccggcgtgaggtgctgcatacagaaggcggggccgggctgaaacgggtggtgaaaaaagaactggcggacggcagcgtcacgcgcagcgggtatgacgcggcaggaaggctcacggcgcagacggacgcggcgggacggaggacagagtacggtctgaatgtggtgtccggcgatatcacggacatcaccacaccggacgggcgggagacgaaattttactataacgacgggaaccagctgacggcggtggtgtccccggacgggctggagagccgccgggaatatgatgaaccgggcaggctggtatcggagacatcgcgcagcggggagacagtacgctaccgctacgatgacgcgcacagtgagttaccggcgacgacaacggatgcgacgggcagcacccggcagatgacctggagccgctacgggcagttgctggcgttcaccgactgctcgggctaccagacccgttatgaatacgaccgcttcggccagatgacggcggtccaccgcgaggaaggcatcagcctttaccgccgctatgacaaccgtggccggttaacctcggtgaaagacgcacagggccgtgaaacgcggtatgaatacaacgccgcaggcgacctgactgccgttatcaccccggacggcaaccggagcgagacacagtacgatgcgtggggaaaggcggtcagcaccacgcagggcgggctgacgcgcagtatggagtacgatgctgccggacgtgtcatcagcctgaccaacgagaacggcagccacagcgtcttcagttacgatgcgctggaccggctggtacagcagggcggctttgacgggcggacgcaacgttatcattatgacctgaccggaaaactcacacagagtgaggatgagggacttgtcatcctctggtactacgatgaatcggaccgtatcactcaccgcacggtgaacggcgaaccggcagagcagtggcagtatgatggccacggctggctgacagacatcagccacctgagcgaaggccaccgtgttgccgtccactatggctatgacgataaaggccgcctgaccggcgaatgccagacggtggagaacccggagacgggggaactgctgtggcagcatgagacgaaacacgcatacaacgagcaggggctggcaaaccgcgtcacgccggacagcctgccgccggtggagtggctgacgtatggcagcggttacctggcgggaatgaagctgggcgggacgccgctggtcgagtatacgcgggacaggctgcaccgtgagacggtgcgcagcttcggcagcatggcaggcagtaatgccgcatacgaactgaccagcacatacacccccgcaggccagttacagagccagcacctgaacagcctggtatatgaccgtgactacgggtggagtgacaacggcgacctggtgcgcatcagcggcccgcgacagacgcgggaatacggctacagcgccacgggcaggctggagagtgtgcgcaccctcgcaccagacctggacatccgcatcccgtatgccacggacccggcgggcaaccggctgccggacccggagctgcacccggacagtacactcacagtgtggccggataaccgcatcgcggaggatgcgcactatgtctaccgccacgatgaatacggcaggctgacggagaagacggaccgcatcccggcgggtgtgatacggacggacgacgagcggacccaccactaccactacgacagccagcaccgcctggtgttctacacgcggatacagcatggcgagccactggtcgagagccgctacctctacgacccgctgggacggcgaatggcaaaacgggtctggcggcgggagcgtgacctgacggggtggatgtcgctgtcgcgtaaaccggaggtgacgtggtatggctgggacggagacaggctgacgacggtgcagactgacaccacacgtatccagacggtatacgagccgggaagcttcacgccgctcatccgggtcgagacagagaacggcgagcgggaaaaagcgcagcggcgcagcctggcagagacgctccagcaggaagggagtgagaacggccacggcgtggtgttcccggctgaactggtgcggctgctggacaggctggaggaagaaatccgggcagaccgcgtgagcagtgaaagccgggcgtggcttgcgcagtgcgggctgacggtggagcaactggccagacaggtggagccggaatacacaccggcgcgaaaagctcatctttatcactgcgaccaccggggactgccgctggcgcttatcagcgaagacggcaatacggcgtggagcgcggaatatgatgaatggggcaaccagcttaatgaggagaacccgcatcatgtgtatcagccgtaccgtctgccagggcagcagcatgatgaggaatcagggctgtactataaccgtcaccggtactacgatccgttgcaggggcggtatattactcaggacccgatggggttgaaagggggatggaatttatatcagtatcctttaaatccactacaacaaattgaccctatgggattattgcagacttgggatgatgccagatctggagcatgtacggggggagtttgtggtgttctttcacgtataataggaccaagtaaatttgatagtactgcagatgctgcgttagatgctttgaaagaaacgcagaatagatctctatgtaatgatatggaatactctggtattgtctgtaaagatactaatggaaaatattttgcatctaaggcagaaactgataatttaagaaaggagtcatatcctctgaaaagaaaatgtcccacaggtacagatagagttgctgcttatcatactcacggtgcagatagtcatggcgattatgttgatgaatttttttcaagtagcgataaaaatcttgtaagaagtaaagataataatcttgaagcattttatctcgcaacacctgatggacgatttgaggcgcttaataataaaggagaatatatttttatcagaaatagtgtcccgggattgagttcagtatgcataccgtatcatgattaattttagtgcttttattagtggggcctataaggagattcaatgaaatatagttcaatattttcgatgctttcattttttatactatttgcctgtaatgagacagctgtttacggttctgatgaaaacattatttttatgaggtatgtggaaaaattacatttagataaatactctgttaaaaatacggtaaaaactgaaacaatggcgatacaattagctgaaatatatgttaggtatcgctatggcgaacggattgcagaagaagaaaaaccatatttaattacggaactaccagatagttgggttgttgagggagcaaagttaccttatgaagttgcgggtggtgtatttattatagaaattaataagaaaaatggatgtgttttgaatttcctacatagtaaataatgctggcgctgatggatgcggatggaaacattgcgtggagcggggagtatgatgagtggggcaaccagctgaatgaagagaacccgcatcacctgcaccagccgtaccggctgccggggcagcagtatgataaggagtcggggctgtactacaaccggaaccggtactacgatccgttgcaggggcggtatatcactcaggacccgatagggctggaggggggatggagtctgtatgcgtatccgctgaatccggtgaatggtattgatccattagggttaagtcccgcagatgtagcgctaataagaagaaaagatcaactaaaccatcaaagagcatgggatatattatctgatacttatgaagatatgaagagattaaatttaggtgggactgatcaatttttccattgtatggcattttgtcgagtgtctaaattaaatgacgctggtgttagccgatcggcgaaagggctgggttatgaaaaagagattagagattacgggttaaatctgttcggtatgtacggcagaaaagtaaagctatcccattctgaaatgattgaagataataaaaaagacttggctgtaaatgaccatgggttgacatgtccatcaacaacagattgctcagatagatgtagtgattatattaatccagagcataaaaaaacgataaaggctttacaagatgctggctatctcaagtaatctatcaaagatgataatatttatttttgctattataatcattgttgttttatgcgtaattacttatctttatttatacaaagatgaatctcttgtaagtaaacattacataaactatatggcaataccagaaaatgatggagtttttacatggctcccagatttttttccgcacgtagcggtggatatatcaatatacacaaatgtagaagatgattatttttttcttatttttccctaacaaatgatgatgggggtaggtttaagaaaacattgacagtgagggccagggaacaagtggcgaaaatcgtatcaaagaatgatccagatacaaaaaaagtgtggtgtaaatatggtaagataccagggcaaggggatggtgtaaaccttttttttgttggtgaaattaatgttacgcattattttataacaaatattggagctggattgcctgatgcttgtgcagagtaattgcttgaattaagagtctatcccatatcgaagtcgtcaacttcgtagtgaggaaaagtaaaattcctgactgagaaaagacatgtcggctattgtgtaaagccatatagctcagacgatgaatatctactcgtattcagttgtttattgagggtgagttccgaccctgaaacaacaaataaaatgaacagtcagagagtttacatagaattgcactggtcttttacgatatctgacattgtgtaatacatattcagccatgcattaattaaaatgttacgtgtttaatgtgagtccctatctgaaaataaataatccttccggattaaaataaattcttgccgggaaagaaagaggaaataaaccattagcggaaaaccagcggcacgccagggtgacatgccccagtacggcggcccgatagtccagggttcagcgggggtactgatagtcgcgccgactgcatcgagaactccatacaactttttacggaacgtcacctgataaaatttgttcagtatcgtcttttgagattctcaaggttatggagtaaccagacagaacggacaccactgtcggagataaaaaccccctgtttacgcagctcgttgctggcccggtgctgaccatgtgtcgggaaagcgacggcgtaatcaacaacagcctgttcagttgcctcatcggtacggttcttaaggttaggagcgcggcgactacgattaatctgcgcatccacaccgccttcagcgaccagttcgcggtaacgataaaacgtatcacgcgaaacgcccatgattttacaggcttttgatacgttgctgagttcttcagccagattgagcaaaccggctttgtgtttgatgacgggattggcagtatgaagcatgagagttacctcttgttttggataaggattcgacactcatatcaaaaccggtaactctcaacctttcaaggccatgtgtcagatcaagtcgcgactaatacaaatacgtccctcattaccgcgccttaacccattccgccacttccgcccactcaccgcgaaagacaactttttccgcttttttctcaagctgatagcgatacatcgggtcgtaatattcttcaagtaacggcaccagccaggccagatgaccgtcggtgctgccggtggtgagttgcgttgtcagtgctgcatccagccttgcagccagttcgttatagcgctgtagccccagccgacgcttaatcgccgaaagtccgtgatgcaggtattcgcaatactcctgccagccctgttcgtcgccgtacgcgtgggtaaaatcatgatgcatacgcaagaaatactcttcgttcaggcgctcaagacggatctcaaacggatcttctaccaccgcaatcgccgcctgagtcattcgctcgcgcaggcattccggcaggtgattcgaaccgatcatccggctttcgtcttccagcacccacaggcgcaaattctgacgggcgtcggtttttagcatttcggcagccagcaggttttcaaaactcgcctggctaagttgtggttgtaacgtgcgaccaaacgccgaaccgcgatgacgcgccaacccttccagatcaacaccgttcggctgttgctgcactaacagcgttttaccgctgccggtacaaccgccaatcagcactatcggtttttgtgccagttcaatagtcgcctgaatcgcggtctggcgcagtgccttataaccgccttccaccagcggataatcaatccccgctgcatgcaaccagctttgcacaatatgtgagcgctgaccgccacgggcgcagcagagaataccttgcggattttgcaggcacgctgcccgccaggcgtccatgcgctgctgacgaatttcacccgccaccagtttatgtcccagcgccagcgctgcgtctgagccttgctgtttatagcaggtgccaacggcggcgcgttcatcgttattcattaacggcagattgatagcggcgggcattgcgccgtgctcaaactcgataggggcgcgaacatcaataatgggcgtatcagcaatcagcagggcacgatagtcctgttccgtgtgtctctcttgcatagttaaaagtgaacctcaaatcagcttgcgcgctattttacgcgccaacgcgcaaggaaacttgatttttaactgcgtgggttgccgaaaatttctaaaaatccgctgatttccggcctgcgctgggtaaacaaggtcacaatatcttctaccgctttgccgctgccaaatttgcgccatgccagactcaatggcgaaggagggcgcatcgttgggattacccggctgaccagttgttgattatcgatcattgactggcaaagcgattttggcaaaaaaccaatgccaacgcccgccagatgggcggcgattttcgtttccatatcgggaacaataatctctttttgccctggcaatcgccaggcgacgcgtttggttaaggtgcgggcgctgtcttcaatattgaccgccggaaagcgccgcaactgcgcttctgttagcggctcttcaacgttcgccagcggatgatccgccgccatgacaaagcgccattgcaccgatcctaagggatcaagactaaaggtatttgccagcgcctcagttcccgtgacgccgatagccagcgaaaaaccttcgtacaatagcgagtcccagacgcccatatagatttgtcgggagatgtgaaactgggtaaaggggtaacgctcattcagccacgccagcaactgggcgacggcctgggggttgtagagcaggttgttgatgacaatattcacctggcgttccacgccatcattcacctgttgcagctcgcttggcatactttccagccagctcagccagtctctggcctgggaaagtagatgctcgccagccgctgtcaacgtcacgctgcgagtcgtacggaaaaacagcgctactccggtattctcttccagaagtttaatgcgataactgatcgtcgccgtggttttacataatcgttctgccgcttttgaaaaacttcctgtttcagcaaccgcaatgaaagtccgcaaggtttctggatcgaacatcttcaggtatccccttttaaatccgcaagttgcgtgattttcttatcctctgatttatcagtatttttacatgataaccctgttcaatttgtggactaaatctagttttggaaaaatattccaacttttgtattgatgttgttctcttaaggttttagattgcctgttattgaaaccaagctgaccggtcggcggtggttgaacggaattatgttacaaggacaaaaagatgaaacttcaggtattaccgttaagtcaggaagcctttagtgcttatggcgacgtaatcgaaacgcagcaacgggattttttccatattaacaatggcctggtggagcgttaccacgatttggcgctggttgagattcttgagcaagactgtacgcttatcagcattaaccgcgcgcaaccggcgaatctgccgctgaccattcacgaactcgaacgtcatccgctgggtactcaggcctttatcccgatgaaaggtgaggtgtttgtggtggtcgtggcgttaggtgacgacaaaccagacctgtcaacgctgcgggcgtttatcaccaacggcgaacagggagtgaattaccatcgtaacgtctggcatcacccacttttcgcctggcagcgcgtcaccgattttctgaccatcgatcgcggcggcagtgacaactgtgatgttgaaagtattcctgaacaggaactctgttttgcgtgacgcctgcaaccgacttgcataagataaactaattgttcattgtttatgctcacttgtaggtcggagttaacgtaggtatgacggaagttagacggcgcggcaggccaggacaggcggagcctgtggcacagaagggcgcacaggcgttagagcggggaattgcgattctgcaatatttggaaaaaagtgggggaagttcgtcggttagcgatatttctctcaatctggatttgccgctctccacgacctttcgcttgctgaaggttttacaggcagcggattttgtctatcaggacagtcaattaggctggtggcatataggattaggtgtctttaacgtcggtgcggcgtacatccataaccgcgatgtcctctccgtcgccgggccgtttatgcgccgcctgatgttactttccggcgaaacggtcaatgtcgcgatccgtaacggcaatgaagcggtattaattggtcagttagagtgtaaatcgatggtcaggatgtgtgcgccactgggcagtcgtctgccactgcatgcttccggtgcgggcaaagcgctgctttatccgctggcggaagaggagttgatgagcatcattctgcaaaccggtttgcagcagtttacgccaactacgcttgtggatatgcccaccttgctgaaggacctggaacaagcgcgtgaactgggctataccgtagataaagaagagcatgttgtaggtctgaattgcatagcttcagcaatttacgatgatgtcggtagtgttgttgccgctatctccatctccgggccttcatcaagactgacagaagatcgttttgtcagtcagggtgagctggtcagagacaccgcccgcgatatcagcacggcgttgggactgaaagcacatccataatgtctgtcgcatcccgctctgcggagcgggtttttttgacaaaatttgaaagttggaaaaattttccaataaatagaggtaggaataaaatggcaaaaatgagagccgttgacgcggcaatgtatgtgctggagaaagaaggtatcactaccgccttcggtgttccgggagctgcaatcaatccgttctactcagcgatgcgtaagcacggcggtattcgtcacattctggcgcgtcatgtggaaggtgcttcgcacatggcggaaggttatacccgcgcaacggcagggaatatcggcgtatgtctggggacttccggtcctgcgggcacggacatgatcaccgcgctctattccgcttctgctgattccattcctattctgtgcattaccggccaggcaccgcgcgcccgtctgcataaagaagattttcaggccgtagatattgaagcaattgctaaaccggtcagcaaaatggcggttacagttcgtgaagcggcgctggtgcctcgcgtgctgcaacaggcatttcacctgatgcgttctggtcgtccgggtccggtactggtggatttaccgttcgacgttcaggttgcggaaatcgagtttgatcctgacatgtacgaaccgctgccggtctacaaacctgctgccagccgtatgcagatcgaaaaagctgtagaaatgttaatccaggccgaacgtccggtgattgttgccgggggcggggtaattaatgctgacgcagctgcactgttacaacagtttgctgaactgaccagcgttccggtgatcccaacgctaatgggctggggctgtatcccggacgatcatgaactgatggccgggatggtgggtctgcaaaccgcgcatcgttacggtaacgcaacgctgctggcgtctgacatggtgtttggtatcggtaaccgttttgctaaccgtcataccggctcggtagagaaatacaccgaagggcgcaaaatcgttcatattgatattgagccgacgcaaattggtcgcgtgctgtgtccggatctcggtattgtctctgatgctaaagcggcgctgacactgctggttgaagtggcgcaggagatgcaaaaagcgggtcgtctgccgtgtcgtaaagaatgggtcgccgactgccagcagcgtaaacgcactttgctgcgcaaaacccacttcgacaacgtgccggtgaaaccgcagcgcgtgtatgaagagatgaacaaagcctttggtcgcgatgtttgttatgtcaccaccattggtctgtcacaaatcgctgcggcacaaatgctgcatgtctttaaagaccgccactggatcaactgtggtcaggctggtccgttaggctggacgattccggctgcgctaggggtttgtgccgctgatccgaaacgcaatgtggtggcgatttctggcgactttgacttccagttcctgattgaagagttagctgttggcgcgcagttcaacattccgtacatccatgtgctggtcaacaacgcttatctggggctgattcgtcagtcacaacgcgcttttgacatggactactgcgtgcaactcgctttcgagaatatcaactccagtgaagtgaatggctacggtgttgaccacgtaaaagtagcggaaggtttaggttgtaaagctattcgggtcttcaaaccggaagatattgcgccagcctttgaacaggcgaaagccttaatggcgcaatatcgggtaccggtagtcgtggaagttattctcgagcgtgtgaccaatatttcgatgggcagcgaactggataacgtcatggaatttgaagatatcgccgataacgcagcggacgcaccgactgaaacctgcttcatgcactatgaataagggagataaataatgttacgtttctctgctaatttatcgatgttatttggagaatatgattttctcgcccgttttgagaaagctgcgcagtgtggttttcgcggcgttgaatttatgtttccttatgactacgacattgaagaattaaaacatgtgctggcgagtaataaactcgaacatacgctgcacaatttaccggcgggtgactgggcggcgggggagcgcggtattgcctgtattcctggccgtgaagaagagtttcgggatggcgtagcagcagcgattcgttatgcccgtgcgctgggtaataaaaaaattaactgtctggtcggtaaaacgccggctggtttcagcagtgaacagattcacgcaacgcttgtagaaaacctgcgttatgccgcgaatatgctgatgaaagaagatattttattactgattgaacctattaaccattttgatattcctggtttccatctcaccggaactcggcaggcgctgaaattgattgatgatgttggttgctgcaatttgaaaattcagtatgacatttatcatatgcagcggatggaaggtgaattaaccaacaccatgactcagtgggctgataaaattggtcacctgcaaattgccgataatccgcatcgcggcgaaccgggaaccggagaaattaattatgattatctctttaaggtaatcgaaaattctgactacaacggttgggttgggtgtgaatataaaccccaaaccaccacggaagccggtttacgctggatggatccgtaccgttaaaacgtaacgctattcagacaatgcttttttaggccgctaagttggcaggggatcgtgttgtctgaattcaggaaaagcgaaatttaaaagaggttaattatgaaactgggatttattggcttaggcattatgggtacaccgatggccattaatctggcgcgtgccggtcatcaattacatgtcacgaccattggaccggttgctgatgaattactgtcactgggtgccgtcagtgttgaaactgctcgccaggtaacggaagcatcggacatcatttttattatggtgccggacacacctcaggttgaagaagttctgttcggtgaaaatggttgtaccaaagcctcgctgaagggcaaaaccattgttgatatgagctccatttccccgattgaaactaagcgtttcgctcgtcaggtgaatgaactgggcggcgattatctcgatgcgccagtctccggcggtgaaatcggtgcgcgtgaagggacgttgtcgattatggttggcggtgatgaagcggtatttgaacgtgttaaaccgctgtttgaactgctcggtaaaaatatcaccctcgtgggcggtaacggcgatggtcaaacctgcaaagtggcaaatcagattatcgtggcgctcaatattgaagcggtttctgaagccctgctatttgcttcaaaagccggtgcggacccggtacgtgtgcgccaggcgctgatgggcggctttgcttcctcacgtattctggaagttcatggcgagcgtatgattaaacgcacctttaatccgggcttcaaaatcgctctgcaccagaaagatctcaacctggcactgcaaagtgcgaaagcacttgcgctgaacctgccaaacactgcgacctgccaggagttatttaatacctgtgcggcaaacggtggcagccagttggatcactctgcgttagtgcaggcgctggaattaatggctaaccataaactggcctgatacccgcaataaaaatggccgatatcagaaaatgaatcggccagcaatattaaaaaagaaagcagccaaagatgttgcttcagtattaaaaataatatttttattttatttgttcctcatagctagattaaaacaacgttattcgatacgtgaaattaagagggatttatggaacatcagagaaaactattccagcaacgcggctatagcgaagatctattgccgaaaacgcaaagccagcggacctggaaaacatttaactattttaccttatggatgggttcggttcataacgttcccaattatgtgatggtcggcggcttttttattctcggcttgtctacctttagtattatgctggcaattatcctcagcgcctttttcattgccgcggtaatggtattaaacggtgctgcgggcagtaaatacggtgtgccttttgccatgatcctgcgtgcttcttacggtgtacgtggtgcactgtttcccggattattaaggggcggaattgccgccatcatgtggtttggtttgcaatgttacgcggggtcactggcctgcttgattctgattggcaaaatctggccgggatttttaactctcggtggtgatttcactctgttaggcctttctctaccgggcttaattactttcttaatcttctggctggtcaacgttggtataggttttggcggtggcaaagttttaaataaattcactgccattcttaacccgtgcatctatatcgttttcggcggtatggcgatttgggcgatttcactggtcgggatcggtccaatctttgactacattccgagcggtattcagaaagcagaaaacggtggcttcctgttcctggtggtgattaacgcggtagttgcggtctgggcggcaccggcggtgagcgcatccgactttacgcaaaacgcccactcgtttcgtgagcaggcgctggggcaaacgctgggtttagttgtggcctatattctgtttgcggtcgccggggtatgtattattgccggagccagtattcactacggcgctgatacctggaacgtgctggatattgttcagcgttgggacagcctgttcgcctcgttctttgcggtactggttattctgatgacaactatctccactaacgcgaccggtaatattattccagccggttatcagattgccgccattgcaccgacaaaactgacctataaaaacggcgtactgattgccagtattatcagcttgctgatctgcccgtggaaattaatggaaaatcaggacagcatttatcttttcctcgatattatcggcggaatgcttggtccggtaattggtgtcatgatggcgcattattttgtggtgatgcgcggacaaattaatcttgatgaactgtataccgcacctggcgattataaatattacgataacggttttaacctcactgcgttttcagtaactctggtggccgttattttatctcttggcggtaagtttattcactttatggaaccgttatcgcgtgtttcatggtttgtcggcgtcatcgtcgcctttgcggcctacgccttattaaagaaacgtacaacagcagaaaaaacaggagagcaaaaaaccataggttaattaatcccgatattgaacattgagttaaaaaccaatctgtattttacaaggagtttgttatgtcttttgatttaatcattaaaaacggcaccgttattttagaaaacgaagctcgcgttgtagatatcgccgttaaaggcggaaaaattgctgctatcggtcaggatctgggcgatgcaaaagaagttatggatgcgtctggtctggtggtttcgccgggcatggttgatgcgcacacccatatttctgaaccgggtcgtagccactgggaaggttatgaaaccggtactcgcgcagcggcaaaaggtggtatcaccaccatgatcgaaatgccgctcaaccagctgcctgcaacggttgaccgcgcttcaattgaactgaagttcgatgccgctaaaggcaagctgactattgatgcggcacaactcggtggcctggtgtcttacaacatcgaccgtctgcatgagctggatgaagtgggcgttgtcggcttcaaatgcttcgttgcgacctgtggcgatcgcggtatcgacaacgacttccgtgatgtaaacgactggcagttcttcaaaggtgcgcagaagctgggcgaactgggtcagccggtgctggtgcactgcgaaaacgcgctgatttgtgacgaactgggcgaagaagcgaagcgtgaaggtcgcgtaaccgctcatgactatgtggcttcgcgtccggtatttaccgaagtggaagcaattcgccgcgtactgtatctggcgaaagttgctggttgccgtctgcacgtttgccacgtcagcagcccggaaggtgttgaggaagtgactcgtgcacgtcaggaaggtcaggacgttacttgtgaatcctgcccgcattactttgtactggataccgatcagttcgaagaaatcggtactctggcgaagtgttcaccgccgatccgcgatctggaaaaccagaaaggcatgtgggaaaaactgtttaacggtgaaatcgactgcctggtttccgaccactctccatgcccgccggaaatgaaagccggtaacatcatgaaagcatggggcggtatcgccggtctgcaaagctgcatggacgtgatgttcgatgaagcggtacagaaacgcggtatgtctctgccaatgttcggcaaattaatggcgactaacgcagcagatattttcggtctgcagcaaaaaggccgtatcgccccaggaaaagatgccgacttcgtcttcattcagccgaatagcagctatgttcttaccaatgacgatctggaatatcgccacaaagtcagcccgtatgttggccgtaccattggcgcgcgtatcacgaaaaccatcttacgtggtgatgtgatttacgacattgaacagggcttccctgttgcgccgaaaggtcaatttatccttaaacatcagcagtaatctggcccctgcaatgcccgtccttgcggcgggcattctccggttaaggtgtgtttatgttcaattttgcagtcagccgcgaaagcctgttatcaggatttcagtggtttttctttattttttgcaacacggttgtggttcctcctacgctactttctgcttttcagttgccgcaaagtagcctgcttacgctcacgcaatatgcttttcttgctaccgcactggcctgcttcgctcaggcgttttgcggtcatcgtcgcgctattatggaagggccaggtggcctgtggtggggaaccatccttactatcacccttggtgaagcatcgcgcgggacaccgatcaacgatatcgccaccagcctggcagtggggattgcactctccggcgtgctgacgatgttgattggttttagcggattaggccatcgcctggcacggttatttacgccgtcggtgatggtcttgtttatgttgatgctgggcgcgcagctgaccactatctttttcaaaggtatgctcgggctgccgtttggcatagccgacccgaattttaaaattcagttaccgccgttcgcgctctcggtggcggtgatgtgcctggtactggcgatgattatcttcctgccgcaacgttttgcccgttatggcctgctggtcggcaccataaccggctggttgttgtggtacttttgctttccttcttcgcactcgctctccggtgagttgcactggcagtggttcccgctcggcagtggcggtgctttgtcgccgggaattattctgacggcggtgattacaggtctggtaaatatcagcaatacctacggtgcgattcggggcacggatgttttttatccgcagcagggcgcagggaatacgcgttatcgtcgtagctttgtggcgaccggatttatgacgctgataaccgtaccgctggcggtaattccattttcaccgtttgtttcatccattggtttattaacccagactggcgattacacgcggcgttcgtttatttatggcagcgttatttgcctgctggtggcgctggttcctgcactcacgcgactgttttgcagtatccctttacccgtgagtagtgcggtcatgctggtttcttatctgcctttactcttttccgcgctggtgtttagccagcaaataacgtttaccgctcgcaatatttatcgactcgcattgccgttatttgtcggcatatttttaatggcattaccgcctgtgtatctgcaagaccttccattaacgcttcgtcctctgctcagtaacggcttattggtcgggattttactggctgttcttatggataaccttattccgtgggaacgcatcgaataatttgttgaaaaaggattgataatgaagattgtcattgcgccagactcttttaaagagagcttaagtgcagaaaaatgttgtcaggcaattaaagccgggttttcgaccctctttcccgatgcgaactatatctgtttgccgatagcggatggcggcgaagggacggtggatgcgatggtcgccgcgacgggcggcaacatcgtgacgcttgaagtctgcgggccgatgggcgaaaaagtgaatgctttttatggccttaccggcgacgggaaaacggcggtgattgagatggcggcagcaagtggcctgatgctggtcgcgcctgaaaagcgtaatccgttgctggcctccagttttggtacgggggagttaattcgtcatgcgctggataacgacattcgccatattattctcggcattggcggcagtgcgacggtcgacggcggtatgggcatggcgcaggcgctcggtgtgcgtttccttgatgccgacggtcaggcgctggcggcaaacggtggtaatttagcgcgcgtggcaagcattgagatggatgaatgcgatccgcgtctggcgaattgccatattgaagtagcatgtgacgttgataacccgctggtaggggcacgcggcgcggcggcggtgtttggcccgcaaaaaggggcaacgccggagatggtcgaagaacttgaacaggggctgcaaaattacgcccgtgttttacaacagcaaactgaaattaatgtctgccagatggcgggcggcggcgctgcgggcggtatgggtattgcggcggcggtatttctcaatgcggatattaaaccgggcattgaaattgtgttgaatgcggtcaatcttgcgcaggcagtgcagggcgcagcactggtgattaccggggaagggcgcatcgactcgcaaacggcaggcggtaaagcgccgctgggtgtggcgtcggtggcgaagcagtttaatgtaccggtgattgggattgctggcgtattgggtgatggcgtggaagtggtgcaccagtacggcattgacgcggtattcagcattttgcctcgtctggcacctttagccgaagtgctcgccagcggtgaaaccaatctcttcaacagcgcgcgaaatattgcctgcgccattaaaataggtcagggaattaaaaactaacccttacctttaaagcggatgcgatttatatcgcataagagtgcagtactcatgccggatgcggcatgagtaccatatccttcctgaaaatcgcgcaaattctatatattgcagagatcatgtaggcctgataagcgaagcgcatcaggcaatgttacaaaaaaagccacggtataaaccgtggcaaaatccaacatagctaaaaataatcaggcgagtggtatgacttaaatctctacgtcgcggttacaatctttcgagtaaatatagctgaacgcttcaccacgccctacaccataaccagcctgtaaagaataagcgcccataaagatgtaatcgccttttttcaccgggatccagttattgtcgaggttataaaccccctgaccggaaagaatataggcaccgtgttcctgaacgtgtgtttcgatataaccgtggctggcacctggtgcaaaagagaggatatgcatgttcatatcaaaacctaactctttgggcagaaaatccagcagaataacatcgtccatgccttcataatgaatgcgttccagttcgctggcattgccagaaaccagccacggtgcatagccttctaccggaacatagcggcgcttatataaaaagatttggctgtcttcggcctgggcgttaacaaacgtcattaaggagcctggcgggcaataaagatagccaccttcgcttaaggcaaatgttttgccttcggctttggcagtgatatttccagagatcacatacaggaacgtttcaatgccttcgccaccgaagccctgttggttgccaccgttttgatgcagtgtgaccagataatcaacaaaagaggcacccagctttggcgtggagaggattgtcgcgtcacaattttcaaagcccggaataatattttttaccagaccatccggggttaacagtgcgaaattaccgtgtttaacaatcgcacggttagccagtaaatcttcgcggtaaccggtgacgttatttaaatatcccatttatgactccttatttctgccaggcaagttgataaagcatgagtgccaacgttttgaccccttcggcaaggtcggtaatattggtgcgttccgccgggttatggctgatcccgttgatgctggggataaaaatcatgcaggttggtacgcgaggcgcgaaaatttgcgcgtcgtgcccggcaccactgtgcatcacccggtaattcagtttttctctttcacacaattctgtcagggtggcgaccagctccttattcatcggcacgggttcttcgtccatccataaatcgatatcaataccaatgtccatttcatcgcaaatcgcccgcatgtcgttttctaactgttgggtgaaatcgcgcagcacggcagcgtcggtatgacgacaatcaatggtgaacgtggttttacccggcaccacatttaccgtattcgggcgcggctctactttgccaaaggtcagaaccagcggatcgcccatccttttcgctttttcgaccgactgatggcaaatgcgactgaaagcgtaaactgtatcacgacgataacccatcggcgtggtgcctgcatggtttgattcgccgttcagcgttaccgtataacgacgctgcccgacaattgcattcaccacgccaattgattgcccattactttccagcacacagccctgttcaatatgcagttcaacaaaggctttaatatcctgacgcggagttagtggggcgttcggaagagtaaatccgcaagccttcatcgcatcgacaaaactatttcctttggcatcacagatattccgcacgtcgtcaggattcgccagcccaaaaatatttttactgccccagaagacatacgggaagcggctgccttcttcttctgccatcgccaccacttcgaccgtacgtagcggcgcgccgtattgcgttttcagccagtcaattgccagccacgccgccagcgcgccgaattgcccgtcaaggttaccgccgttaaccacggtatcgatatgcgaaccgctcagaaccacttcctgtggatattcggtgccattcaggcgaccgtataaattccccacttcatcgaaacgtgtttccagcccgcttgctgccattctttttttaaattgctgctgggtttccagccattccggcgaataaagtaaacgggtcatcccacccgctgggtcagcgccaaaagaggaaagccagggcagcgtttcttctatagcttgacggaaatgtgtaatcataagaaagtcctgtctcaataattattgcgcaaagggatttttcgtttcgtatgacgtgttataaagcgcgtcggaaattaaatactggtaaatatcatcaacaatttcgatgccttcgacggcggctttgcgttgtttaatatcctgatcctgtccgggataataaacctgattaaaaccgggcgcgggggtaatggcatttaattcgcgcatggtctggctaagatgttgacggaataattcgctggaggagaaaaagttcggattaataactatatgtaattgccccaaattacgccctgcgtgtaaatcgtcatacatcgaactaacctgtcgcccgaacggtaagccgagtaagacgcctgagaggacgtcaatcatcatcatcaggccatacccttttggcccggcggcggggagcagagcatgtaccgcgaacggatcggttgttggtacaccgtttttatcgaccgcccaggtatccgggatagacatattacgcgagcgggcgtcgagcacttttccccatgcctgtacggtagtcgccatatcaaaggtaaggatctcgtcgccttctcccggcgcggcaaaggccagggggttagtaccgtagtaaatttccgcgccgccaaacggcaccaccattggatcggactggcacatcgaaatgccaatgaatccggcgcgggctgcctgctgcacaaaataagagattgcgccgctgtgacccatccggctgataccgaccaccgcaacgccattttgctgggcggttttgatggcatgttccatacccattttcgccgcgacctgtccggcggcattgtcggcatgtaaaattgccgagcacggcccggtttcctcaagacgaaactccggttcgcggttggtgccgccttttgaaatgcgttccgcgtagtattccacgcgcaccgcgccatgagagtggatccctctggcatcggcgtaaaccaatacttcagccacggttgcagcgtgctcacgttttaacccagcctggcagagtttattctcaattagctggtggagtgtttcccgactgattttcatctgtcttcctttttaacgacggtgtgaagcatgactgcaattaacatacagggaaaatatctggattatgtgatccagacaggcaaaaaaatatagttagaatttatttgataatccgctcacttttaacctgatttttaaaacaacaacgcttattaaaaaataatgagtaatagcctggtggttatttgaattcttttgttaataattcctgtgtgatattcatcaccttatttactcgttgtcatcgataccgtaatcgccacattaacactgctcgtgcaattgccatgggtgcaatttttaaggagttgttatgatccacgcctttattaaaaaagggtgttttcaggattcggtcagtttaatgattatttcacgaaaactcagcgaatcagaaaatgttgatgatgtttccgtaatgatgggtacgcccgccaataaagcgttattagataccacaggtttctggcatgacgattttaataacgccacgccgaacgatatttgcgtggcaattcgtagcgaagcggcggatgcggggatcgcgcaggcgattatgcagcagcttgaagaggcgctaaaacaactggcgcaggggtcaggcagcagccaggcgttgacgcaggtgcgtcgctgggacagtgcctgtcagaaattacccgatgccaatctggcgctgatttcagtggctggcgagtatgcggcggagctggcaaaccaggcgctggatcgcaacctcaacgtgatgatgttctccgataacgtcacgctggaagatgaaatccaacttaaaacccgcgcgcgggaaaaaggcttgctggtgatggggccggactgcggtacgtcgatgattgccggcacaccgctggcttttgctaacgtgatgccggaaggcaatattggcgtcattggcgcttccggtaccgggattcaggagctgtgttcgcagattgcgctggcaggggagggaattactcacgcgattggccttggcgggcgcgacctcagccgtgaagtgggcggcatcagtgcgctaacagcgctggaaatgctcagtgcagacgagaaaagcgaagtgctggcatttgtttcaaaaccacctgccgaagctgtgcgtctgaaaattgttaatgccatgaaagcaaccggcaaaccgacggtggcgctgtttttaggttataccccggcggtggcccgcgacgagaatgtctggtttgcctcctcgctggatgaggccgcacgcctggcttgcctgctttcacgcgtcacggcgcgacgtaacgcaatagcgcctgtcagcagcggatttatttgcggtttgtataccggcggtacgctggctgccgaagcggcgggattacttgccggacaccttggcgtggaagccgacgatacccatcaacatggcatgatgctggacgccgatagccaccagattattgacctcggcgatgatttctacaccgtcgggcgtccccatccgatgatcgacccaaccttacgcaaccagttaattgccgatctcggcgctaaaccgcaagtgcgcgtgttgctgcttgatgtcgtgattggcttcggtgcgaccgccgatcctgccgcctcgctggtgagcgcctggcaaaaagcctgtgccgcgcgtttagataatcaaccactgtatgccattgccacggtgacaggcactgaacgtgacccgcaatgccgctcgcagcaaatcgccacgctggaagatgcggggattgcggtcgtgagttcgctaccggaagccaccttgctggcggcagcgttaattcatccgctctcgcctgccgcacagcaacacacaccgtcattactggaaaacgtcgccgtgattaacatcggattacgcagctttgcgctggagctacaaagcgccagcaaaccggttgtgcattaccaatggtcgccagtcgccggtggcaataaaaaactggctcgtttattagaacgtttgcaataaggggttcccatgtttacatcagtggcgcaagccaatgctgcggttatcgaacaaattcgtcgcgctcgtccacactggctggatgtgcaaccggcttcttcacttatcagcgaactaaacgaaggcaaaacactgcttcacgccgggccgccaatgcgctggcaggagatgaccggacccatgaaaggggcgtgcgtgggcgcatgtctgttcgaaggttgggcgaaagatgaagcgcaggcgctggcaatactggagcaggggaagtgaacttcattccttgtcaccatgtgaatgccgtcgggccaatgggcggtattacttctgccagtatgccgatgctggtggttgagaacgtgaccgacggcaaccgggcgtactgcaacctcaacgaaggtatcggcaaagtgatgcgttttggcgcttacggcgaagatgtcctgactcgccatcgctggatgcgcgatgtgttaatgccagtattaagcgcggcgctggggcgcatggagcgcggtatcgatctcacggcgatgatggcgcagggcattacgatgggcgatgagttccatcaacgcaatattgcttcctctgcactgttaatgcgtgcgctggccccacaaattgctcgcctcgatcatgataaacagcacatcgccgaagtgatggatttcctcagcgtgaccgatcagttcttcctcaacctcgcgatggcttactgcaaggcggcgatggatgctggcgcgatgatccgcgcaggcagcatcgtcacggcaatgacccgcaacggcaatatgttcgggattcgggtaagcgggctgggcgaacgctggtttactgcgcctgtaaacactccgcaaggtctgtttttcaccggcttctcgcaggagcaggcgaacccggatatgggcgatagcgcgattaccgaaacctttggtatcggaggtgcggcaatgatcgcagcgcctggcgtaacgcgctttgtcggtgcgggtggcatggaagcggcaagagcggtatctgaagagatggcggaaatttaccttgaacgcaatatgcagttgcagatcccaagctgggattttcagggcgcgtgcctggggctggacattcgtcgcgtggtagaaaccggcattacgccactcatcaataccggtatcgcccataaagaggcggggatcgggcagattggcgcaggcaccgtgcgggcaccgctggcgtgctttgaacaggcgctggaagcactggctgaaagcatgggtattggttgaggaacgcgcaatgacgatcatccatcctctgcttgccagtagtagcgcaccgaattatcgccagtcctggcggttagcgggagtgtggcggcgggcgattaacctgatgacggaaagcggcgaactgttaacgttgcatcgtcagggtagtggtttcggccccggaggatgggtgcttcgccgtgcgcaattcgatgcgttatgcggtggattatgcggcaatgaacgaccacaggttgtggctcaagggattcgcctcgggcgtttcacggttaaacagccacagcgttattgtttgctgcgtattacgccgcctgcgcatcctcaaccacttgcagctgcatggatgcaacgcgcggaggaaaccgggcttttcgggccactggcgttggcggcaagcgatccgctgcctgctgagttacgccagtttcgtcactgttttcaggccgcgctcaatggcgttaagaccgactggcggcactggctgggtaaaggccccggattaacgccgagtcatgatgacacgctgagcggaatgctgctggcggcctggtattatggcgctttagatgcgcgctccggtcgtccgttttttgcctgttccgacaatctgcaactcgttaccacagcggtgagcgtcagttatttacgttatgccgcgcaaggatatttcgcctcgccactcctgcactttgttcatgctctgagttgcccgaaacgtaccgctgttgcgattgattcgctgctggcgctggggcatacgtcaggggcagatacgctgctggggttctggcttggccaacaattattacaaggaaaaccatgaaaacactggttgtggctcttgggggcaacgccttactccagcgcggtgaggcgctgacggcagaaaatcaatatcgcaatatcgccagtgctgtacccgcgctggcacgcctggcccgttcttatcggttggcgattgttcacggcaacgggccgcaggtggggctgctggcattgcagaatctggcgtggaaagaggtagaaccgtatccgctggatgtgctggttgcggaaagccaggggatgattggctatatgctggcgcagagtttgagcgcacagccgcagatgccgcccgtgacgacggtgctgacgcgcattgaggtttcgcctgatgatccggcgtttttgcagccagagaaatttattggtccggtttatcagccagaagaacaagaggcactggaagcggcttacggctggcagatgaaacgtgatggtaaatatttgcgccgggtggtggcgtctccgcaaccgcgtaaaattctcgacagcgaagccatcgagttgttgctcaaagaggggcatgtggtgatttgcagtggcggcggcggtgtgcctgtgacggatgacggagcagggagtgaagcagtgattgataaagatctcgccgctgcgttgctcgccgagcagattaatgcagatggactggtgatcctcaccgatgctgatgcggtatatgaaaactggggaacgccgcagcaacgtgccattcgccatgccacaccggatgagttagcgccatttgccaaagccgatggttcgatggggccgaatgtaacggcggtgagtggttatgtcagaagccgtggtaaacccgcgtggattggggcgttatcgcgaattgaagagacgctggcgggcgaagcggggacctgtatttcgctgtagtcgtaggcattagacatttgtgcctgatgcgacgcttgacgcgtcttatcaggcctacaaccggtgccgcatccggcaattggtgcacaatgcctgatgcgatgcttgacgcatcttatcaggcctacaatgggtaccggatcggtaggccggataaggcgtttacgccgcatccggcaagaatagagcaccagttaaccgaacttactctgcgcccaaatcacgccgctggcatattccggcggcagcagcgggattaaggcttccagcgtcgcagtcagacgcgatgtgtcgctgtcggtcaaattcagatgccccactttacgccccggacggacttctttgtcgtaccagtgcagatgcaccagcggcagtttcagccagtcataattcacatcgctaccaatcagattgatcatcaccgacggattattcaccactggttgcggtaacggcagatcggtaatcgcccgcagatgcagctcaaactggctgatgctggcaccgttttgtgtccagtgaccgctgttatgcacacgcggtgccagttcgttgatcaacagaccttgcggggtgacaaaacactccatcgccatcacgcccacatagcccagctcctgcataatcgccgacagcatctcttcggcttgcgcctgctgctgtgcgttggcctgcggaaaagcgacgctggtgcgcaaaataccgtcctgatgcaggttatgcgtcagcggataaaacacggtgctgccatcaaagccgcgcgcgccaaccagcgacacttcaccagagaagttaatgccctgctcgacaatacattcgccgtaacactctgccggtaactgttcggtttcatttgcgcgtaaacgccattgaccgcgaccgtcataaccaccagtgcgacgcttaacaatcgccagctcacctaaacgatcaaacaccgcaggccactcgctgcgttcggcaagtaactgccacggtgcagtcggcaggtggagcttatcgaaaagctgcttctgagtcagacggtcagcaataatcgggaacacatcgcggttcacaaaggccggatggcgcgccagctcgcgggttaatgcggtttccggccagcgttctatctcagcggtaatcacgctttgttgaaaaggcaccgccgccggttcagcgtccagcccgactggccagacagcaatgcctaacggttcgcctgcctgacgcagcatacggcctaactgcccgttaccgaggacgcaaacctgtttcatgccgcacctcgcgggtccgggttttccagcacttcgtcggtctgggctttgcgccagtcattcagacgctggtgcagttctttatcatgagtcgcaagaatttgtgctgccagtaacgccgcgtttgccgcgccagctttaccaatcgccagcgtacccaccggaatgccgcgcggcatttgtacgatggagtagaggctatcgacaccgctcagtgcggcgctctgtactggcacgcccagcaccggcaccagcgttttggcggcaatcatgcctggcagatgcgctgcgccgcctgcgcccgcaataatcacctgataaccgttctcttcggcgctttcggcgaagctgaacagtttatcgggggtgcggtgagcagaaaccacttcaacgtggtgcgggacattcaggatttcgaagatttcggcggcgaactgcatggtagcccagtcgcttttggaccccatcacgatggcgacacgcgccggattattgcgggaagacatgcgtcttaaaactcctgtggtgcacaactctcggctttagagggcacagagaatagcacggaaagagagcaaggaaaacggttgcgtggctgtgaaatcagcaaagttgcgggttttttaaaacggaaaatgaatcagctcaacgtcatccgccgtgactttcaccattgaaccttccgtatgccaggcacccagtaccacgcgaaaagcaggttgctgattggcgataagttcatgcaccgccgggcgatgggtatgcccgtggatcagccattgcacctgatgtttttccatcgcactgaccaccgcgttttggttaacgtccatgatcgccagcgatttactgctgttggcttctttgctgttcgcgcgcattcgcgcggcaatgcgtttgcgcacaaacaacggcagggcgaggaatagcgtctgcagccagggtttgtggaccttggcgcgaaaagcctgataacccgcgtcatcggtgcacagcgtgtcgccatgcataatcaacacccggcgaccataaagttcgagcaccttttcttccggcaataacgtcatgccactttcacgggcaaagcgtttgccgagcagaaaatcacggttgccatgaatgaaataacagggaacgccggaatcggacaccgctttgatcgccgccgccatcttgcgatggagtgggttgggatcgtcgtcgccaatccatgcttcaaacagatcgccaagaatatacagcgcgtcggccttgcgggcttcccccgctaaaaaacgcagaaaaccggcggtgatcgccggttcttccacgcagagatgaagatctgcaataaagagtgtcgccacgattactcgctaacggtcacgctttcaatgataacgtcttcttttggcacgtcctggtgcataccgctacgaccggttgcaacacctttgattttgtctaccacgtccatgccgtcaaccacttcagcaaacacgcagtagccccaaccttgcaggctttcgccagagaagttcaggaagtcgttatcaaccacgttgatgaagaactgtgcagttgcagagtgcggagcctgagtacgtgccattgccagcgtaccacgggtatttttcaggccgttgttggcttcgtttttgatcggttctttggtggctttttgtttcatgcccggttcaaaaccgccgccctgaatcataaagccgttgataacacggtggaaaatggtgttgttgtaaaaaccttcgcggcagtagtccaggaagtttttaactgtttcaggtgctttatcgtcaaaagttttgatgacaatatcgccgtgattggtgtggaaagtaaccatttttgcatcctgttccgtttgattggtgcttcaacccagttcgggtcatatatagggtggtgttatagcataaccgcacgatcggatcatcacgcaatgtatgctgattcgcgcgggaaatatgggtattatacgcaactcaattacccacacatgtctaaacggaatcttcgatgctaaaaatcttcaatactctgacacgccaaaaagaggaatttaagcctattcacgccggggaagtcggcatgtacgtgtgtggaatcaccgtttacgatctctgtcatatcggtcacgggcgtacctttgttgcttttgacgtggttgcgcgctatctgcgtttcctcggctataaactgaagtatgtgcgcaacattaccgatatcgacgacaaaatcatcaaacgcgccaatgaaaatggcgaaagctttgtggcgatggtggatcgcatgatcgccgaaatgcacaaagattttgatgctttgaacattctgcgcccggatatggagccgcgcgcgacgcaccatatcgcagaaattattgaactcactgaacaactgatcgccaaaggtcacgcttatgtggcggacaacggcgacgtgatgttcgacgtcccgaccgatccaacttatggcgtgctgtcgcgtcaggatctcgaccagctgcaggcaggcgcgcgcgttgacgtggtcgacgacaaacgcaacccaatggacttcgttctgtggaagatgtcgaaagagggcgaaccgagctggccgtctccgtggggcgcgggtcgtcctggctggcacattgaatgttcggcaatgaactgcaagcagctgggtaaccactttgatatccacggcggcggttcagacctgatgttcccgcaccacgaaaacgaaatcgcgcagtccacctgtgcccatgatggtcagtatgtgaactactggatgcactcggggatggtgatggttgaccgcgagaagatgtccaaatcgctgggtaacttctttaccgtgcgcgatgtgctgaaatactacgacgcggaaaccgtgcgttacttcctgatgtcgggccactatcgcagccagttgaactacagcgaagagaacctgaagcaggcgcgtgcggcgctggagcgtctctacactgcgctgcgcggcacagataaaaccgttgcgcctgccggtggcgaagcgtttgaagcgcgctttattgaagcgatggacgacgatttcaacaccccggaagcctattccgtactgtttgatatggcgcgtgaagtaaaccgtctgaaagcagaagatatggcagcggcgaatgcaatggcatctcacctgcgtaaactttccgctgtattgggcctgctggagcaagaaccggaagcgttcctgcaaagcggcgcgcaggcagacgacagcgaagtggctgagattgaagcgttaattcaacagcgtctggatgcccgtaaagcgaaagactgggcggcggcggatgcggcgcgtgatcgtcttaacgagatggggatcgtgctggaagatggcccgcaagggaccacctggcgtcgtaagtaattgcgctattgccggatgcgagttttcgcatccggttatcgtctgcgccaccacaacattcccatcagtagcatccccggcaaccacacccacatcaattcagaaataatcacctgatgcccgtacggcgtggtgtaacgagacaatgcaaacggcgcgacttttatcacctgccagggagcgaaaaagcgttcatctgaccacggccacagccagccaacgcctttaccgccagtggttaccgaatccagcaagctgtgcgatagcaacgagacggttaaaaacagccagcagcgaatcagcccagccctgaaccatcggcgtccaataaacacacataacagcgggacaacaaacgcaaacaccagcgaatgggtaaacccgcgatgaccaaaaacattgccgtaagcaacgccaaatttaaacgacaatacgtcggcgtcgggcagcatcgccaggatgattccggcaaataacagacgcggagggatgactttcgaacccaaccctaaaccaatgcataggggaacggcggcgtgcgtaataacggttggcatgatggtcgcttcggcaaaatgtcgatgctatcagcatggatgaacggggcgtagagggcaaaagtctgaaaagagaaccggcctgttgatacaggccgggaaagggatcaggcaacaacctgtacgctgtgacctgcaaaactcactgtctgaccggcgacgattttgcagcgtttgcgcgtttcaaccgcaccgtcgactttcacctggccttcggcaatcgcgattttcgcctgcgcgccgctttcgctccagccttccagtttcagcaagtcgcacagctcaacgtgcggatgtttacctaaagaaaatgtcgccatgttactcatcctgtggatcatgatattcaacgcacgcctgtagcgtgttttcaatcagcgtggcaaccgtcatcgggccaacgccgccgggaacaggcgtaatgtatgaggcgcgtttagccgcgtcttcaaacacgacgtcgcccacaactttgccattttccagacggttgatgccgacatcaatcacaattgcgccttctttgatccagtcaccgggaataaagcctggcttgccaacggcaacgatcaatagatcggcattttctacgtgatgacgcagatttttagtgaagcggtgagtcactgtagtggtgcaacctgccagcagcagttccatgctcatcgggcggccaacgatattcgatgcgccaatcaccacggcgttgaggccgaaggtatcaatgttgtaacgctcaagcagcgtgacgataccgcgcggggtgcagggacgcagacgcggcgcgcgctggcacagacgaccgacgttgtaaggatggaaaccgtccacgtctttgtccggatgaatacgttccagcactttgacgttatcaatacccgccggtaacggcagttgaaccagaatgccatcgatggtgttgtcggcattcagcgtatcgataagctccagcagctccgcttcgctggtggtttccgggaggtcataagagcgggagacgaacccgacttcttcacaagccttgcgtttgcttgcgacataaatttgcgatgcagggttactacccaccagcacaacggccagtcctggtgcccgcagtccggctgcaatacgcgcctgaactttttgagcaacttcagagcgcacctgctgcgcaatcgttttaccgtcaataatctttgctgccatcagagagaggattccatctgttacgtagatcgaaggggatgcgcctattttgtcagaagcggggcgcgctgtcaggtttcgtttcagatttatcgcgtgaagcgacctcttgcgaaggtgaggcgcaccgtcgctgagactgaaagcttcatttttcgtccatgatggcgttgtaaatctggaactgatttatttccttgtctaaggattaagataatttaagaaatacctgacaatataaaaagaattttcagcctggtaatttaccgcttcaggtctatatttgtgttgaatatattttgcgcggaagtattcatctaacggggctctctattttttagaatagagtgcatattttcaattaagacattcttagaggataaaaaggaatttactactatcagtgtcttaaataaagtaatcggttatatacggatgtggagtcgataaatgagattgaaggaatatatatgaaattaagatttatttcgtctgcgctggctgccgcactattcgccgctacgggtagttatgctgccgttgtagatggcggtacaattcactttgaaggcgaactggtgaatgctgcctgttcagtgaatactgactcggcagaccaggttgtcacactcggtcaatatcgtaccgatattttcaatgctgttggtaatacctctgcattaattccattcaccattcagttgaacgactgcgatcctgttgttgccgctaatgctgccgttgcattttctggtcaggctgatgcaatcaatgataatttattggccattgcatccagtaccaatacaacaacagcaacgggtgtcggtattgaaatacttgataatacatccgcaattctcaaacctgatgggaatagcttctcaaccaaccagaacttgatccccgggaccaacgttcttcatttttctgcacgttataaaggcaccggtacaagtgcatcagcagggcaagcaaatgctgacgcgacttttattatgagatatgaataatcaaaaccacgttgttttgaattatatatcacgtcttataacaaagtaatgtaccggttgtctgaagcggtatggtggcaatgtaaatcgaaatcatgttcactttgtatcatgccgctttattaaatgaaaagggaatgatgtgttgtaagaaaccaaagcaatcatttctttatattccttatttttgccgtcaggaatacacaaggcgtattaactatgatgactaaaataaagttattgatgctcattatattttatttaatcatttcggccagcgcccatgctgccggagggatcgcattaggtgccacgcgtattatttatcccgctgatgctaaacagactgcggtatggattagaaatagccataccaatgagcgctttctggtcaattcgtggattgaaaacagcagcggtgtaaaagaaaagtcattcatcattacaccgccactgtttgttagtgaacccaaaagcgaaaatactttgcgtattatttacaccggtccaccgctggcagcagatcgtgagtctctgttctggatgaatgttaagacgatcccttcggtagataaaaatgcattgaacggcaggaatgttttgcaactggcgattttatcgcgcatgaaattatttctccgtccaattcaattacaagaattacccgcagaagcgccggacacactcaagttttcgcgatccggtaactatatcaatgttcataatccatcacctttttatgtcaccctggttaacttacaagtgggcagccaaaagttggggaatgctatggctgcacccagagttaattcacaaattcccttaccctcaggagtgcagggaaagctgaaatttcagaccgttaatgattatggttcagtaactccggtcagagaagtgaacttaaactaaccgaatcatctgacaatatcagagctaattatgaaaatacccactactacggatattccgcagaggtatacctggtgtctggccggaatttgttattcatctcttgccattttaccctcctttttaagctatgcggaaagttatttcaacccggcatttttattagagaatggcacatccgttgctgatttatcgcgctttgagagaggtaatcatcaacctgcgggcgtgtatcgggtggatctctggcgtaatgatgagttcattggttcgcaggatatcgtatttgaatcgacaacagaaaatacaggtgataaatcaggtgggttaatgccctgttttaaccaggtacttcttgaacgaattggccttaatagcagtgcatttcccgagttagcccagcagcaaaacaataaatgcatcaatttactgaaagctgtacctgatgccacaattaactttgattttgcagcgatgcgcctgaacatcactattcctcagatagcgttgttgagtagcgctcacggttacattccgcctgaagagtgggatgaaggtattcctgctttactcctgaattataatttcaccggtaacagaggtaatggtaacgatagctatttttttagtgagctcagcgggattaatattggcccgtggcgtttacgcaacaatggttcctggaactattttcgcggaaatggatatcattcagaacagtggaataatattggcacctgggtacagcgcgccattattccgctgaaaagtgaactggtaatgggagacggcaatacaggaagtgatattttcgatggcgttggatttcgtggtgtacggctttattcttctgataatatgtatcctgatagccagcaagggtttgccccaacggtacgtgggattgcccgtacggcggcccagctaacgattcggcaaaatggttttattatctatcaaagctatgtttcccccggcgcttttgaaattacagatttgcacccgacatcttcaaatggcgatctggacgtcaccatcgacgagcgcgatggcaatcagcagaattacacaattccgtattcaacagtgccaattttacaacgcgaagggcgtttcaaatttgacctgacggcgggcgattttcgtagcggtaatagtcagcaatcatcgcctttcttttttcagggtacggcactcggcggtttaccacaggaatttactgcctacggcgggacgcaattatctgccaattacaccgcctttttattagggctggggcgcaatctcgggaactggggcgcagtgtcgctggatgtaacgcatgcgcgcagtcagttagccgacgccagtcgtcatgagggggattctattcgcttcctctatgcgaaatcgatgaacaccttcggcaccaattttcagttaatgggttaccgctattcgacacaaggtttttatacccttgatgatgttgcgtatcgtcgaatggaggggtacgaatatgattacgacggtgagcatcgcgatgaaccgataatcgtgaattaccacaatttacgctttagccgtaaagaccgtttgcagttaaatgtttcacaatcacttaatgactttggctcgctttatatttctggtacccatcaaaaatactggaatacttcggattcagatacgtggtatcaggtggggtataccagcagctgggttggcatcagttattcgctctcattttcgtggaatgaatctgtagggatccccgataacgaacgtattgtcggacttaatgtttcagtgcctttcaatgttttgaccaaacgtcgctacacccgggaaaatgcgctcgaccgcgcttatgcctcctttaacgccaaccgtaacagcaacgggcaaaatagctggctggcaggtgtaggtgggaccttactggaaggccacaacctgagttatcacgtaagccagggtgatacctcgaataatgggtacacgggcagcgccacggcaaactggcaggccgcttacggtacgctggggggcgggtataactacgaccgcgatcaacatgacgttaactggcagctgtctggcggtgtggtcgggcatgaaaatggcataacgctgagccagcctttaggggataccaatgttttgattaaagcgcctggcgcaggcggtgtacgcattgaaaatcaaactggcattttaaccgactggcgcggctatgcggtgatgctgtatgccacggtttatcggtataaccgtatcgcgcttgataccaatacgatggggaattccatcgatgttgaaaaaaatattagcagcgttgtgccgacgcaaggcgcgttggttcgtgccaattttgatacccgcataggcgtgcgggcgctcattaccgttacccagggcggaaaaccggtgccgtttggatcactggtacgggaaaacagtaccggaataaccagtatggtgggtgatgacgggcaagtttatttaagtggtgcgccattgtctggtgaattactggttcagtggggagacggcgcgaactcacgctgcattgcgcactatgtattgccgaagcaaagcttacagcaagccgtcactgttatttcggcagtttgcacacatcctggctcataaaggaaattatcaataagataatctgcagattattattggcgatggcatgtttgtgtctggcaaacatatcctgggctactgtttgtgcaaatagtactggcgtagcagaagatgaacactatgatctctcaaatatctttaatagcaccaataaccagccagggcagattgttgttttaccggaaaaatccggctgggtaggtgtctcagcaatttgtccacccggtacgctggtgaattatacataccgtagttatgtcaccaactttattgttcaggaaactatcgataattataaatatatgcaattacatgattatctattaggtgcgatgagtctggttgatagtgtgatggatattcagttccccccgcaaaattatattcggatgggaacagatcctaacgtttcgcaaaaccttccattcggggtgatggattctcgtttaatatttcgtttaaaggttattcgtccctttattaacatggtggagatccccagacaggtgatgtttaccgtgtatgtgacatcaacgccttacgatccgttggttacacctgtttataccattagttttggtggccgggttgaagtaccgcaaaactgcgaattaaatgccgggcagattgttgaatttgattttggtgatatcggcgcatcgttatttagtgcggcagggccgggtaatcgacctgctggtgtcatgccgcaaaccaagagcattgcggtcaaatgtacgaatgttgctgcgcaggcttatttaacaatgcgtctggaagccagtgccgtttctggtcaggcgatggtgtcggacaatcaggatttaggttttattgtcgccgatcagaacgatacgccgatcacgcctaacgatctcaatagcgttattcctttccgtctggatgcagctgcggcagccaatgtcacacttcgcgcctggcctatcagtattaccggtcaaaaaccgaccgaagggccgtttagcgcgctggggtatttacgcgtcgattatcaatgaggtacggagaatgagaagagtactctttagctgtttctgcgggctactgtggagttccagtggatgggcagttgaccctttaggaacgattaatatcaatttgcacggtaacgttgttgatttctcctgtaccgtaaacacagcggatattgataagacggtagatttaggcagatggcctacgacacaactactgaacgctggcgataccacggcactcgtcccttttagcctgcggctggagggatgtcctccgggttcagttgcgattttatttacgggaacgccggcatccgataccaacctgctggctctggatgatcccgcaatggcacaaaccgtcgccatcgaattacgtaatagcgatcgctcccggctcgcactgggggaggcgagcccgactgaggaagtagatgcaaatggcaatgtcacactaaacttttttgccaattatcgagcgttagccagcggtgttcggccaggtgtggcgaaagcggatgcgatatttatgatcaattataattaatattatattaattcgtataatttggcgtagtcgataagctctacaattgaatgcaaacctagcttgccataaatattagatttatgcgcactaactgttttattgctaagtaataacttatcggcaatttctttattagataatccgctaaccagataacgtaatatggtcacttcacgattagatagcacagtgaccgttgaactattcgtactacatttattgctttttatatagttaagcgtttcgctgggaaaaaacgtgtatccggagaggatcatctgaacggcatgaaaaatatcattctgatcattgcatttactgacaaaaccgttagcaccagcttgtatcgctctgccagcataaaagcattctgatttcgatgataaaaataacactttcactgtgctctggatttgtttgatccttttcaggaaggtaaaaccgtctgttccgggcaagtctatatccataatgattaaatcaacaggacgggttcggagataatcgatggttatgcgataatcatccgttttcaggacaatctgcaattcactgtttttttgcaacagaacttcaatagacattctgatgataggatgagtatccataatgatcaccgacgttggtttcatagttaccagtctcataggagcggacaattttccgttaggtcgggaaattgtactttgatacatgaaaatacgggttttcttgattcagacgcgcagcggtgtgcgtttgtttgccgctatagcgaaataaatcagaaaatcagacgcggtcgttcacttgttcagcaaccagatcaaaagccattgactcagcaagggttgaccgtataattcacgcgattacaccgcattgcggtatcaacgcgcccttagctcagttggatagagcaacgaccttctaagtcgtgggccgcaggttcgaatcctgcagggcgcgccattacaattcaatcagttacgccttctttatatcctccataatttcagagtgggacatatttgggacattatcaccaaaaatgtcgtctattttcctcgcatgctctgtcaaatgattaggcgcaaggtgagcatacctacgaaccatttctatggactcccatccgcccatttcctgaagcactgataatgggacgcctgactgaatcagccagcttgcccaggtgtgtctgaggtcatggaaacggaaatcttcaattcctgcacgacgacaagctgatagccatgatgtcttgctgtcgatgcgcatcttcctgaccgcaggcgttgatgttccatctgctcgcttagccgccttggtatgtacaaacacccatttgtgatgcttgcctatttgatcacgcaacactttacaggcggtatcgttcagcgccacaccaatggcgcggtttgatttgctctcttctggattcacccaggcaactcgtcgctgcatgtcgatttgttgccattccagatttatgatgttcgactttctcagaccagttgccagcgcaaacttgacgacagatttcagtggttcggggcactcatcaataaggcgttttgcttcctccttttccagccatctgactcgcttgtttctgaccgctggtatcttgatgacaggcgctttttccagccacttccagtcgcgttctgcagcacggagaatggcctttatcatggcaagatgctttgcctttgtctgagttgatactggctttggttcataaacaggcagttctttacctttcctgatggcggcctgaactttctgtttccatatttctttcgtctttctgttatgcattctgcttacagcagagtaaatctttgcctccgagatatctttaagccttataccctcaaaatgttcaagccagaactcaatccggcttttatctgaatcgagagattttttatcagctttttcctcaagccatcttaggcaggcctcttcaaaagtgacatcaggtaaatcccctagcttttctactcgccagagttctgcttttcgcttgtcgtgcaactcctgagcttgccgtttgtcctttgtgccaagagattccttaattcgtttcccgcccgggagcgaatacgaggcataccatatttcatttctgcggaagagtgacattttctttcctctgttatgccatcacccgcgctcacctggacagtatgcagcggagactgaagcgccgcaatgcaggcttgccgtgttgtgaggtacccggatattatcgtgaggatgcgtcatcgccattgctccccaaatacaaaaccaatttcagccagtgcctcgtccattttttcgatgaactccggcaccatctcgtcaaaactcgccatgtacttttcattccgctcaatcacgacataatgcaggccttcacgcttcatgcgcgggtcatagttggcaaagtaccaggcatcttttcgcgtcacccacatgctgtactgcacctgggccatgtaagccgattttattgcctcgaaaccaccgagccggaatttcatgaaatcccgggaggtacgagtattgccggaagcgtggcctgtatccggatgcagagtcttatccgtggaaatcgaacgcgcattactggttggttaccaacttgtaccagaacatgcgggccaatgcgctggctgacgcggaattacggcgcaaggctgccgatgaactgacctgtatgacagcgcgaattaaccgtggtgagacgatacctgaaccagtaaaacaacttcctgttatgggcggtagacctctaaatcgtgcacaggctctggcgaagatcgcagaaattaaagctaagttcggactgaaaggagcaagtgtatgacgggcaaagaggcaattattcattacctggggacgcataagagcttctgtgcacaggacgttgccgcggtaacaggcgcaaccgtaatctgatcttacccagcaatagtggacacgcggctaagtgagtaaactctcagtcagaggtgactcacatgacaaaaacagtatcaaccagtaaaaaaccccgtaaacagcattcgcctgaatttcgcagtgaagccctgaagcttgctgaacgcatcggtgttactgccgcagcccgtgaactcagcctgtatgaatcacaactctacaactggcgcagtaaacagcaaaatcagcagacgtcttctgaacgtgaactggagatgtctaccgagattgcacgtctcaaacgccagctggcagaacgggatgaagagctggctatcctccaaaaggccgcgacatacttcgcgaagcgcctgaaatgaagtatgtctttattgaaaaacatcaggctgagttcagcatcaaagcaatgtgccgcgtgctccgggtggcccgcagcggctggtatacgtggtgtcagcggcggacaaggataagcacgcgtcagcagttccgccaacactgcgacagcgttgtcctcgcggcttttacccggtcaaaacagcgttacggtgccccacgcctgacggatgaactgcgtgctcagggttacccctttaacgtaaaaaccgtggcggcaagcctgcgccgtcagggactgagggcaaaggcctcccggaagttcagcccggtcagctaccgcgcacacggcctgcctgtgtcagaaaatctgttggagcaggatttttacgccagtggcccgaaccagaagtgggcaggagacatcacgtacttacgtacagatgaaggctggctgtatctggcagtggtcattgacctgtggtcacgtgccgttattggctggtcaatgtcgccacgcatgacggcgcaactggcctgcgatgccctgcagatggcgctgtggcggcgtaagaggccccggaacgttatcgttcacacggaccgtggaggccagtactgttcagcagattatcaggcgcaactgaagcggcataatctgcgtggaagtatgagcgcaaaaggttgctgctacgataatgcctgcgtggaaagcttctttcattcgctgaaagtggaatgtatccatggagaacactttatcagccgggaaataatgcgggcaacggtgtttaattatatcgaatgtgattacaatcggtggcggcggcacagttggtgtggcggcctcagtccggaacaatttgaaaacaagaacctcgcttaggcctgtgtccatattacgtgggtaggatcaaccagcataaatcaggctgcggctaaaatggcgcgggcaggaatcctggtcgttgatggtaaggtctggcgaacggtgtattaccggttcgctaccagagaagaatgggaaggaaaggtgagcacgaatctgatttttaaggagtgtcgccagagtgccgcgatgaaacgggtattgagggtatataaaagaacatcaatgggaacacaatgatgaaacaggtgagttgagttcaaactgtagtacaattctctccagtttgaacaggaaagaatatgctatgaacccttatatttatcttggtggtgcaatacttgcagaggtcattggtacaaccttaatgaagttttcagaaggttttacacggttatggccatctgttggtacaattatttgttattgtgcatcattctggttattagctcagacgctggcttatattcctacagggattgcttatgctatctggtcaggagtcggtattgtcctgattagcttactgtcatggggatttttcggccaacggctggacctgccagccattataggcatgatgttgatttgtgccggtgtgttgattattaatttattgtcacgaagcacaccacattaaaataatttgtttctaaacgactaaaatatggaggctcttatatttatatgagcctcgttttatgctttttgttaatgtctttattttttatgtattcttttgtgctttcaagattatggcgtaagaaaattgcaatacgattattgttgtatattcaagataatgtgaccttaattgtctttttaaataaaaaataaacaaaaattatatcccaccactaaggtttataaaagcatacgttagcaggtgtcaccatgaaaaaagccatagcatatatgcgattttcatcaccaggtcagatgtctggcgactcattaaaccgacagagaagacttattgctgaatggttaaaggtaaatagtgattattatcttgataccataacatatgaagatttaggattaagtgcattcaaaggaaagcatgcacaatcaggagctttttcggaatttttagatgctatagagcatggttatatattgccaggaactacattgttagttgaaagtctggacagactttcaagagaaaaagtcggtgaagcgattgaacgtctgaaattgattttgaatcacggtattgatgttataactctttgcgacaatacagtctataatattgactctttgaatgagccatattcattaataaaagccatacttatagcacaaagggcaaatgaagaaagcgagataaagtcaagtcgggttaaattatcatggaagaaaaaacggcaggatgcactggaatcaggtacgattatgacggcgtcttgtccgagatggctctccttagatgacaaaagaacggcttttgttccagaccccgacagggtgaaaactattgagctaatttttaaactcaggatggaaaggcgctcattgaatgcaatagccaagtatttaaatgatcatgctgtaaagaatttctcaggaaaagaaagtgcatggggaccttctgtaattgaaaaattattagcgaataaagctctgataggtatttgcgtaccttcatatcgtgcaagagggaaagggataagtgaaatcgctggctattatcccagagtcatatcagatgatttgttttacgctgtacaggaaattcggttggcaccttttggtattagcaatagtagcaagaatcctatgctaataaatctacttcgaacagttatgaagtgtgaggcttgtggtaataccatgattgttcatgcggtatctggaagtttgcatggctattatgtttgtccgatgagaagattacatcgatgtgacaggccatcaataaaaagagatttggttgattataatatcattaatgaattgctttttaattgtagcaaaattcaaccagttgaaaacaagaaagatgctaatgaaactttagagttaaaaattattgagcttcagatgaaaattaataatttaatcgttgcattgtctgtcgcgcctgaagttaccgctatagcagagaaaataagactattagataaggaattacgaagggcttcggtatcattgaaaactttgaagagtaaaggtgtaaattcattcagtgatttttatgctattgacttaaccagtaaaaatggacgagagttatgccgtacacttgcctataaaacattcgaaaaaatcataattaatacggataataaaacctgtgatatctattttatgaatggcattgtttttaaacactatcctttaatgaaagtaatatccgcccagcaggcgataagtgctctcaaatatatggttgatggtgagatttatttctaaataatgatctcggattttaagttatgctatggtgataaagtgcaagacagaattaattatctttgacgaaacttaatgggtaattactttgtttgctcccacaagcgagttttgtacggctgtattggggtagtaaatgagctatacaatcttaatcatttgttaggtgagaactcttggtcgcagattcaaatactgaaaatacgtgacaaattattatgagcaaaatggtgtatgtcacgtattttgaatggtaggttaaaaaataacaccgactttcgtaggtgttactaataataaagcagagtttttagatagtatcaatgtgctttgtgtatattgtggcaaataattgggttgggggtacaattgtgattgcttttgcatgaacattgcgcctttatgcataatgagataaaggaatatcaaataaaataacgataggtcataacaaagaggtttttatgaaaacacttatcgtttcaactgtattggcattcataacattttctgcgcaggctgcagcatttcaggtcactagtaatgaaataaaaacaggagagcaacttacaacgtctcatgtcttttctggatttgggtgtgaaggtggtaatacatcgccctcattaacctggtctggtgttcctgaaggtaccaaaagctttgccgtaactgtatatgatccagatgcacctacaggcagtggttggtggcattggactgttgttaatattccagcaacagtaacatatttgcccgttgatgcagggagacgtgatggaacaaaactgccgactggtgctgttcaaggccgaaatgattttggctatgctgggtttggtggcgcatgtcctcctaaaggagataaaccacatcattaccagtttaaagtatgggctctaaaaactgaaaagattcctgtagattctaactccagcggagcgttagttggttatatgcttaatgctaataaaatcgcaaccgctgagataacaccagtttatgagataaagtagggtgagagtatgctggcaagaggtaagactaacttaaagatcgaagaaatacggatgcataaacatcatgagattcatagggttaagcctcttatgccagctttgtgtcgtatccgtcagggaaagaaagttatcaattgggagacgcatactttaactgttgataataatcaaataatattatttccttgtggttatgaattttatattgagaattatcctgaagcagggctttatcttgcagaaatgctttacttacccattgatttaattgagagtttccaaaaactttatacggtaactgatcaaatacgtaacaaaacaagtttctttttacctcagaatcctgagttaatatattgttgggagcaactaaaaacatctgtttcccgaggcttctcaactaaaattcaggagcacttagcaatgggcgttctactttcgttaggagtgaatcatgttaatcatttacttttatcatatagtaaacaatcattgataagtcgttgttataacctgctgctatccgaacccggcacaaaatggacagcaaacaaggttgctcgatatctctacatttctgtttctacattacatcgccgtctagcaagcgagggggtaagtttccaaagtatactggacgatgtgaggttaaataatgcgttgtctgctatacaaacgacggtaaaacctataagcgagattgccagagaaaatggttataagtgtccttctcgttttactgaaagatttcataatcgttttaatataacaccaagagagataagaaaagcttccagagagtaaaagtgttttaagaaggagcaattctatcgattttgattttgggaaatcaacacggcataattatgtcaccggagcctgaacaactccggtgacttctgcgctaaacggggacgtttatgcgcacatacaatccaaactctcttctcccttcacagatgcagaaatgcacctgcaattctttgcatctagcgtttgacctctgcggaggggaagcgtgaacctctcacaagacggcatcaaattacatcgcggcaacttcaccgctatcggtcggcagatccagccttatctggaggagggcaaatgctttcgcatggtgcttaaaccgtggcgtgagaaacgcagtctttcccagaatgcactcagccacatgtggtacagcgaaatcagtgaatacctcatcagcaggggtaaaacgttcgccactccagcttgggtaaaagatgctctcaaacacacatatctcggttatgaaaccaaagacctggttgatgtcgtaaccggtgatatcaccactatccagtcgttacgccatacctccgatcttgataccggagagatgtatgtcttcctgtgtaaggttgaagcctgggcgatgaatattggttgccacctgactattccacagagctgcgagttccagctgctgcgcgacaagcaggaggcgtaatggctacaccgcttattcgtgtcatgaacggacacatctacagagtaccaaatcgtcgtaagcgtaaacctgagctgaagccatccgaaataccaacactgctcggatataccgccagcttggttgataaaaaatggttgcgactggcagcaaggaggagtcatggctgatttgagaaaagcagcgcgtggtcgggaatgccaggtaagaatccctggcgtatgtaatggcaaccctgaaacgtctgtactggcacatatccggctgactggattgtgcggcaccggtacgaaaccgccagacctgattgccaccattgcatgttctgcctgccacgacgaaatcgaccgccgcacgcattttgttgacgctggatatgcaaaagaatgcgcgctggaaggtatggcgagaacacaggttatctggctgaaagagggggttattaaggcgtgaatacctacagcatcacattaccctggcctccgagcaataatcgctattaccgccataatcgcgggcgcacgcacgtcagcgcagaggggcaggcataccgcgataacgtcgcccgaatcattaaaaacgcaatgctggatatcggcctggctatgcctgtgaaaatccgcattgagtgccacatgccggatcgccgtcgccgtgacctggataatctgcaaaaagccgcttttgacgcactcactaaagcaggtttctggctggatgatgctcaggtcgttgattaccgcgttgtgaagatgcctgttaccaaaggtgggaggctggaactgaccatcaccgaaatggggaatgaatgatgtttgagtttaatatggcagaacttcttcgccaccgctgggggcgtctgcgcttatatcgtttccccggttctgttttgaccgattaccgaatactgaagaattacgccaaaaccctgacaggagcaggagtatgaagtcagagataacaatcaactaatactgttttgttgatttttgcttgtaattggcgttctggtctgatttttgtggagtaagttgatgcgtgatattcagatggttcttgagcgttggggagcgtgggcggctaataatcatgaagatgtgacctggtcgtccattgccgccggttttaagggattaattacttcaaaagtaaaatctcgcccgcaatgttgtgacgatgacgcgatgatcatttgcgggtgcatggcccgtctgaaaaagaacaacagcgatttgcacgatttattagtagattattatgtagtcggtatgacattcatgtcactggcaggtaagcattgctgctctgatggttatatcgggaaaaggttacagaaggctgagggcataattgaagggatgttaatggcattagatatccggttagagatggatatcgttgttaataactctaattaatatgccaattgtttactaaaaattattaaaaatggggcgttgagacgcccccaaaaataaagggtaatatataacagaaggtttatatagttagaagcaaggttgtgcttctaaaggaagtggcttgagggagccacttatatgttggggaggcaacgcctcccgcaacatatctttttcgtaatcagattagaactggtaaaccagacctacagcaacgatgtcatcagtgcttacaccgagtgctttagggaaggtgcgaataagcggggaaattcttctcggctgactcagtcatttcatttcttcatgtttgagccgattttttctcccgtaaatgccttgaatcagcctatttagaccgtttcttcgccatttaaggcgttatccccagtttttagtgagatctctcccactgacgtatcatttggtccgcccgaaacaggttggccagcgtgaataacatcgccagttggttatcgtttttcagcaaccccttgtatctggctttcacgaagccgaactgtcgcttgatgatgcgaaatgggtgctccaccctggcccggatgctggctttcatgtattcgatgttgatggccgttttgttcttgcgtggatgctgtttcaaggttcttaccttgccggggcgctcggcgatcagccagtccacatccacctcggccagctcctcgcgctgtggcgccccttggtagccggcatcggctgagacaaattgctcctctccatgcagcagattacccagctgattgaggtcatgctcgttggccgcggtggtgaccaggctgtgggtcaggccactcttggcatcgacaccaatgtgggccttcatgccaaagtgccactgattgcctttcttggtctgatgcatctccggatcgcgttgctgctctttgttcttggtcgagctgggtgcctcaatgatggtggcatcgaccaaggtgccttgagtcatcatgacgcctgcttcggccagccagcgattgatggtcttgaacaattggcgggccagttgatgctgctccagcaggtggcggaaattcatgatggtggtgcggtccggcaaggcgctatccagggataaccgggcaaacagacgcatggaggcgatttcgtacagagcatcttccatcgcgccatcgctcaggttgtaccaatgctgcatgcagtgaatgcgtagcatggtttccagcggataaggtcgccggccattaccagccttggggtaaaacggctcgatgacttccaccatgttttgccatggcagaatctgctccatgcgggacaagaaaatctcttttctggtctgacggcgcttactgctgaattcactgtcggcgaaggtaagttgatgactcatgatgaaccctgttctatggctccagatgacaaacatgatctcatatcagggacttgttcgcaccttccttagtgaagtcatttttgtcaagcaggttgattttgtaatcaacgaaagtagacatatttttgttgaagtaataggttgcacctacatcaacatatttgactaagtcctgatcgccccatactccaagatccttacctttagattgcaggtaagcaacggacggacgcagaccgaaatcgaactgatattgtgcaacagcttcgaagttttgggctttattagcaacgaagtgatcagcaaatacagtcatattctgggtttcagaataggtagtggccaggtaaatgttgttagcgtcatatttcagacctgcggcccaaacttctgcatttttaccggaagcaaatacttcaggaagaactttccctgcattaacttgagtgtcggtacgatcagatttcgcataagttgcaccgataccgaatccttcgtattcataggtagcagagaaaccgaagccatcaccgttaccttcagtgtagttatcgaaatcgctacgatcgtttttgccttggtactgagcagcaaagttcagaccatcaaccagaccaaagaagtcgttgttacgataggttgcaacaccagttgcacgttgagtcatgaacacgtcggtttgagtccaagtgtcaccaccgaattctggcaggacgtcagtccacgcaccgatgtcgtatgctacaccgtagttacggccgtaatcgatggagccgtagtcaccgaatttcaggccagcgaaggcaagacgggttttatctttggaggaaccttgagattcagcgcggttgcctttgaattcatattcccactgaccgaaaccagtcagttgatcgttgatttgggtttcacctttgaagccaagacgggcataagtagtatcaccatcatctgcatcattagaggagaagtagtgcttagcattaactttcccgtacagatccagcttgttactgtctttattataaatttcagctgcctgagcagacatcgccattagtactgatgcagctacagcagaaattgccactgttaattttttcatcgtgagccctttttttgaactattattaaaaaatgatgtcactgcgcgataaatattcatctaatcaatgtgattatttcaagatgtaagttttggtttctcgtttgatttgtgaagtagatctctatttttatctgaacttttttctatcgaatcctattcatggctcttggctgaataaaaataaatctattagccaatttatattaacggctgttatttataagtgctctataatttgaaggttcaatttaaaccggctaaaaataacactggaaattattttttggttatttgttgagatttgcttatgtatttgtagtggtgttttcaatactcggtagcattctctcaaatatcatttagtggtttacgtacgtaaaaaattggttatgctgttaagagtggttacttcgtcacacagcttaaacccgccgtcgagcgggtttttccattttttgagtctcgatattagctgataacccaatacctgagttattcactgactccgagtctgttacgtttcgtagtattccctcaatttacacccgctttgtctgcgaggtggggttatgaaatccatggataagttaacaacgggtgtcgcctatggcacctcagcaggtagtgccgggtactggtttttacagctgctagataaagtcactccctcacagtgggcagcaataggtgtgctgggtagcctggtatttggcctgctgacgtacctgacaaacctttatttcaagattaaagaagataagcgcaaggctgcgagaggtgaataatgcctccatcattacgaaaagccgttgctgctgctattggtggcggagcaattgctatagcatcagtgttaatcactggcccaagtggtaacgatggtctggaaggtgtcagctacataccatacaaagatattgttggtgtatggactgtatgtcacggacacaccggaaaagacatcatgctcggtaaaacgtataccaaagcagaatgcaaagcactcttgaataaagaccttgccactgtcgccagacaaattaacccgtatatcaaagtcgatataccggaaacaacgcgcggcgctctttactcattcgtttacaacgtgggtgctggcaattttagaacatcgacgcttcttcgcaaaataaaccagggcgatatcaaaggcgcatgtgatcagctgcgtcgctggacatacgctggcggtaagcaatggaaaggcctgatgactcgtcgtgagattgagcgtgaagtctgtttgtgggggcaacagtgagcagagtaaccgcgattatatccgctctgattatctgcatcatcgtcagcctgtcatgggcggtcaatcattaccgtgataacgcaatcgcctacaaagtccagcgcgacaaaaatgccagagaactgaagctagcgaacgcggcaattactgacatgcagatgcgtcagcgtgatgttgctgcgctcgatgcaaaatacacgaaggagttagctgatgcgaaagctgaaaatgatgctctgcgtgatgatgttgccgctggtcgtcgtcggttgcacatcaaagcagtctgtcagtcagtgcgtgaagccaccacggcctccggcgtggataatgcagcctccccccgactggcagacaccgctgaacgggattatttcaccctcagagagaggctgatcactatgcaaaaacaactggaaggaacccagaagtatattaatgagcagtgcagatagagctgaccatatcgatgggcaactcatgcaattattttgagcaatacacacgcgcttccagcggagtataaatgcctaaagtaataaaaccgagcaatccatttacgaatgtttgctgggtttctgttttaacaacattttctgcgccgccacaaattttagctgcatcgacagttttcttctgcccaattccagaaacgaagaaatgatgggtgatggtttcctttggtgctactgctgtctgtttgttttgaacagtaaatgtctgttgagcacatcctgtaataagcagggccagcgcagtagcgagtagcatttttttcatggtgttattcccgatgctttttgaagttcgcagaatcgtatgtgtagaaaattaaacaaaccctaaacaatgagttgaaatttcatattgttaatatttattaatgtatgccaggtgcgatgaatcgtcattgtattcccggattaactatgtccacagccctgacggggaacttctctgcgggagtgtccgggaataattaaaaacgatgcacacagggtttagcgcgtacatgtattgtattatgccaacaccccggtgctgacacggaagaaaccggacgttatgatttagcgtggaaagatttgtgtagtgttctgaatgctctcagtaaatagtaatgaattatcaaaggtatagtaatatcttttatgttcgtggatatttgtaatccatcggaaaactcctgctttagcaagattttccctgtattgctgaaatgtgatttctcttgatttcaacctatcataggacgtttctataagatgcgtatttcttgagaatttaacatttacaacctttttaagtccttttattaacacggtgttatcgttttctaacacaatgtgaatattatctgtggctagatagtaaatataatgtgagacattgtgacgttttagttcagaataaaacaattcacagtttaaatcttttcgcacttgatcgaatatttctttaaaaatggcaacctgagccattggtaaaaccttccatgtgatacgagggcgcgtagtttgcattatcgtttttatcgcttcaatctggtctgacctctttgtgttttgttgatgatttatgtcaaatattaggaatgttttcaattaatagtattggttgcgtaacaaagtgcggtcctgctggcattctggagggaaatacaaccgacagatgtatgtaaggccaacgtgctcaaaccttcatacagaaagatttgaagtaatattttaaccgctagatgaagagcaagcgcatggagcgacaaaatgaataaagaacaatctgctgatgatccctccgtggatctgattcgtgtaaaaaatatgcttaatagcaccatttctatgagttaccctgatgttgtaattgcatgtatagaacataaggtgtctctggaagcattcagggcaattgaggcagcgttggtgaagcacgataataatatgaaggattattccctggtggttgactgatcaccataactgctaatcattcaaactacttaacctgtgacagagccaacacgcagtctgtcactgtcaggaaagtggtaaaactgcaactcaattactgcaatgccctcgtaattaagtgaatttacaatatcgtcctgttcggagggaagaacgcgggatgttcattcttcatcacttttaattgatgtatatgctctcttttctgacgttagcctccgacggcaggcttcaatgacccaggctgagaaattcccggaccctttttgctcaagagcgatgttaatttgttcaatcatttggttaggaaagcggatgttgcgggttgttgttctgcgggttctgttcttagttgacatgaggttgccccgtattcagtgtcgctgatttgtattgtctgaagttgtttttacgttaagttgatgcagatcaattaatacgatacctgcgtcataattgattatttgacgtggtttgatggcgtagatgcacgttgtgacatgtagatgataattattatcattttgtgggtcctttccggcgatccgacaggttacggggcggcgacctcgcgggttttcgctatttatgaaaattttccggtttaaggtgtttccgttcttcttcgtcgtaacttaatgtatttatttaaaataccccctgaaaagaaaggaaacgacaggtgctgaaagcgagctttttggcctctgtcgtttcctttctctgtttttgtccgtggaatgtgcaatggaagtcaacaaaaagcagctggctgacattttcggtgcgagtatccgtaccattcagaactggcaggaacagggaatgcccgttctgcgaggcggtggcaagggtaatgaggtgctttatgactctgccgccgtcataaaatggtatgccgaaagggatgctgaaattgagaacgaaaagctgcgccgggaggttgaagaactgctgcaggccagcgagacagatctccagccagggactattgagtacgaacgccatcgacttacgcgtgcgcaggccgatgcacaggagctgaaaaatgccagagactccgctgaagtggtggaaaccgcattctgtactttcgtgctgtcgcggatcgcaggtgaaattgccagtattctcgacgggatccccctgtcggtgcagcggcgttttccggaactggaaaaccgacatgttgatttcctgaaacgggatatcatcaaagccatgaacaaagcagccgcgctggatgaactgataccggggttgctgagtgaatatatcgaacagtcaggttaacaggctgcggcattttgtccgcgccgggcttcgctcactgttcaggccggagccacagaccgccgttgaatgggcggatgctaattactatctcccgaaagaatccgcataccaggaagggcgctgggaaacactgccctttcagcgggccatcatgaatgcgatgggcagcgactacatccgtgaggtgaatgtggtgaagtctgcccgtgtcggttattccaaaatgctgctgggtgtttatgcctactttatagagcataagcagcgcaacacccttattccagctggcttcgtggctgttttcaacagtgatgagtcatcgtggcatctcgttgaagatcatcggggtaaaacggtttatgacgtagcgtcaggggacgcgttatttatttctgaactcggtccgttaccggaaaatgttacctggttatcgccggaaggggagtttcagaagtggaacggtacagcctgggtgaaagatgcagaagcagaaaaactgttccggattcgggaggcggaagaaacaaaaaacagcctgatgcaggtagccagtgagcatattgcgccacttcaggatgctgtagatctggaaatcgcaacggaggaagaaacctcattgctggaagcctggaaaaaatatcgggtgttgctgaaccgtgttgatacatcaactgcacctgatattgagtggcctacgaaccctgtcagggagtaatcattgggattatgccgcagcacgtcttaagcaagaacatgctgcggttggatgctatttttttcctgaagcggaaaacattactacagtaccttgaaccttggttttaacattctcgaaatgctctgagagtatatgtgttaagccttcttcggaatcttttgtgtttgaaaagatgcctttctgattgtaaatgcgcatcagtttttgaccgaagctattgtgcacaactccatcgccaagaattgtggctccgtatagagttccatcgtcagttaaggcctgcgccgcattgcgtattacacagctttttgtagatatatttccaggcaggcagtgaagaaggtaagacatggaaatggaatcaaattgaccatgtaacgccgcgggataaggttcaaaaacatcatggctaattttatgtttaatttttgattccccagcccttgtagatgccgcgttcaggctagcttcgttcaaatccattaaagatatcagactactctcaggtacgtgagtaaggtaaaacccagttccaacaccaatatccagatggttgttacctaaatgttccagaaagtgtggaagaaggtgttcctttgtaggacatccccatgcaagccgatttgatactcccaaaacccaccagtcataaagctttagggtaagtggtgtgtaaattctagccccatcatctgtgtttttttattaatttcaccatgttatagttttatttgtgaattaaatcaattatggcaatgaattacaaggggttaaatgctgccgcagcatagcgatattgaaatagcctggtatgcttcaatacagcaggagccgaatggctggaagaccgtcaccacacagttctacatccaggaattcagtgagtatattgcgccactgcaggatgctgtagatctggaaatcgcaacggaggaagaaagatcgttgctggaagcctgaaaaaagtatcgggtgctgctaaaccgtgtggacacttccgtagcaccagatatcgagtggcttattcaaccataataaacagtatgtatatcataggttattaattgtgagttttttcggtgtgttatttgtttgtttgatgttatgcttttgcgccccaaaaggttgtttagatgtattttatcaattgattttcaatatcgtttaataaagaaaaattaagcaagctggatgttggttttttgttaattgaatggttctaataatgtttttttactgttgttgaatgtgacttgataagaaatgcaagtaaaaatgatactctttttattttaaattcaaacggttgacatatatatagcaagaggtttcaggtgcgttgtagtgagtttatgttaataaaaagcatagtaagcgttgaaaaatgtaactttgaaataagttagaataaaaaacaacatacatataataatttaatcttaaatgaaatttattaaaatttgcaaactataattttgtgtataaaaatataaatgcacatcatcctgattatgattgtgtatttaattggttgttatttgactactatcaacttgttttaattttatgataggtgcaagatggattatgtttgctccgtagttttcatctgtcaatcatttgatttaattataaacaggagagttatctcgttcaaaaaaaattcattgtttattgtaagcgacaaaattagaagggagttaccagtatgcccctctaaactaagaattgttgatatagataagaaaacatgtttatccttttttatcgacgtgaataatgagctgcctggcaaatttactcttgataagaatggctatattgctgaagaggaacctccattatcgcttgttttttctctgtttgaagggattaaaatagcagactcacactccctttggttaaaagaaagactatgtatatccttacttgccatgttcaaaaaacgcgaaagtgtaaattcatttatactaacaaatataaatacatttacctgtaaaattactggaataatcagttttaatattgagcggcaatggcatttaaaagatattgcggaattgatttatacgagtgaaagtttaataaaaaaaagattaagggatgaaggaacgtcatttactgaaatattgagagatactaggatgaggtatgcaaaaaaactcataacttcaaactcttattctatcaatgtcgtagcccagaaatgtggctataacagtacttcatatttcatatgtgcatttaaagattattatggtgtcacgccatctcattattttgagaaaataatcggcgtcacagatggaataaacaaaacaattgactgataatgtttattacaagttgtctacatgttaattataatattatacagcgttttttttgatgtgatattctggaaccattaatttgtaattgggttgctgtcgcctattttatacatactataattgatggttttctatgtgatttagttaataaccttctgggtttattttaagggttaattgttacattgaaatggctagttattccccggggcgattttcacctcggggaaattttagttggcgttcttaaaatgtgtacttaagaccagcagtagtgatgaagttatagttttctatacctgctccatttttgctgtagtctgaagtgttattattgtgatcataaagtgaagtattaccttttttattcgtaacccgattccatgcgccttcaacataaacttttgcgttaggtgtgacgtaataacctgcattgactgcaacagaatagtaattttggtctttgaccttactgcgataagtgattctttttcccgggtcatagtgttcatcgttatcagatgattccacccagccgctgtatttaaatgtgccaccgagttcaaaatcttcataacgataacttccagtcaagccaatgtagggcattttaaaacgttgtttgtagccgattgctctttctccattcgggaaggagccgatatcatctctgaatccctcctcagaactgtagatataggaaccacctctggctgtaaagctataacggctttcctgatatccggccatgagtcccaggcggtaattgggttcgttgaggagccagcctttgatattcagatcaaattcgttggcataattgagttgtgtatcagggtgtctactttcatccgtccaggttccggggttactggaatccatccagtcctgatcgaccatattgccacctcggctgccgagagttgtccagccagcagccccgatagatatctggggcatcaaatcccaattaattgcacctttaataattgcagcgttattgaatttccagtcgagttgactgacttttcggcctccttcttcggctagataaacacgctcttttgtttttccgctcagagttccaagactaatgtccgcatttatgttgtcaggagtaaacgataaagtctcggtagaagcaaaagagctgatcgcaataggggttgtcaggactattcccagaagtttcgcccgcataaaagttctccattcaatcgttttaatgattgaatatgtattttttatatctaacttaatgagtcaattacatattgctccactgtttatattttgtttagtattgaatgattatcacaatgcgctatctgtttttggtttaattatctgttattgtttcatatttcggttttactgtgtggtttttttatgcttttgtggtgcttttatctatttaagtgccatgcctttagaggcatataagcgaaaatagcatgaggtttatcctcaattactatgttttttagtacaaaaaagagggacaaaactgagacacataaggcctcgcaatggcttgcaaggctttacatgttttgaggtagtgggacgtgtgagcgcagagatggcgcggtaagttgttgacttaaaatgtcgttctaggaacttctaagtcgtgggccgcaggttcgaatcctgcagggcgcgccatttcttcctcatttatgcccgtcttatccgtttccgctttgcccttcaccacatcactttttgtcgctgtttggcgagataattcaacggtgtcaggccgtaaaacgccttaaaaacagagataaagtacgacgtgctgctatagccacataattgcgccacctgagtgatatttttgttatccatcaataacatctgtacggcgtaacgcatacgacactctgtgacaatctggctatagctggtattttcgttttttaatttctttttgagcaggctggggcttaaacatagcgaactggcgacaattcgcagattccagtaatgctgaatatcgctttgaataatgcggcagacgctgtcgcggacgctgctgcgtaagatatacatcagtagggcaataaaccgcgattgctcaagaaagttagacaatacggtaaaaagcaatgcgcgcgtcaactccgcttcgcagggtctgctgggttgctgcttgctgtggttggcggctagccggaacacttccggtgtacggctatgacaagcgataaccggggttgccagccgcgaccagggctttacacaggttaagttcttatttaaaaacaacagataatcgttgatgatgttacggttgatgtgggtgattaatacgtgatttaacgttgagagttcaatgacgttattgttgcacgcgaaggcggccaggtagtttttcggaagggtaaacgtagcatggttattgacgcttacctctacctctttttcggtcaggatcaccacgcaaggttcactgctgctcaattgcatttcgcactcctcagatatcagaaactccgctcaaaggatctatgcttcctgcatgagtgatcggcccgttcgccgataacgatcttctttctttagcacgctttttagcaattaatcttgatggaattctgatgagagcgaaagaggtaagccaggtcgtacccgacttacctggaggagatttaatactcgagaatgccgtgcgcgacgggcaaatagcgcagagagaaatagagagtgtctttaccgcaagaggaacgtttcgctaacagcgaggcaatttctgcgtccggtttcggtttcgctgtaaaggttttgcctttgccggcgacaaaaagttcataaacaacgccgctggcaggggcgggactttggcaatcggcgctggcctgtaaataacgttcacgctgttcagcggtcagtttatccacgccgctgccatcctgtacccagacattaacgccggttgctttaacgtgttccagcagttggcgatagccatcgggcgacatgtttccggcgaaaaaactactgatataaaccggttttgctgaaacatcgctaatcagccgctgcgcgttgtttaaccatgttagcaaaggctgacgggcggcttcgctgcgccagttcaggtcgtcaatttccgcgctgatgtaccagccatccggcgttatgccaggcgcggcgctccataatctggcttgctggagatcggcagccagcaggcgattaagatagctttccagcgctgcggacgactgtttctggtgcataaaaaattccggatcggcgttcagcccgacaataagcttcagaccagcctgttgcgcagctgcggcccgcttaaacaataacgtgcgctgttctggctgggtaaatgcatcgccgtaacgggtccattgcaaaacaagggtatcgaagccttgcaaacgtaactgactcatcagcccctgccactgggtatcggtaacctgactatctcggttttgtggttgccagataatacctttcatcgcaaaggaaaaagggctgaccaaaagcagtgtcagcaatacgaaaatgaacttacgcatttaccagtgcactccaatggtgagaaacgcgttgttgcgctctccgttacgttgattaatcgccttaaaggtatgttgatactcgacgccgagactgactttgtgcggccaggcgtcgtagtgcgtctcgccggtccagatattccagcggaccccgactccgccaagctgcgcgccctgagtgcctttatcacgatagccgttgtcctgaacgtgagcgtaaggctcaatagtctgtccgttagctaccttctgatgccagctgacgcgataatctgccgtccacgcctgaatatcctggcggatatattgcgccgcatcgaggtacaggttttgggcaaaccagcctgaaccgttcgggtgccattcgtcgctgtatttgccgccattaaagaatgaggcgctggcgcgcagcatggtatcggatgcgccattttggccgttcagcggcaactgctgttcgacggcgatgaaaaagatctgatcgcgcagcggcttccagcgcagaccggtgccggacatcggatttttcaccggcatcatcaccccgttttctccggtatcggcaaagacgcggctataaactgagagcaggtcgccttccagcagcatattgcgtccgatgcggtactcggcttccagttgtccgtagctacgatagcttttccctggcgctgcgccgccgacattattgttagcggtactcattgcgccggaacgcaagccgatggaagaatcgaaactgaacgtccagcggcgaccgacctcctcatgcaaacggcggaaattgaagcgttgttgattttgttctggggtcagtggggttatcagcgcctgattatcaatgtcatcaatcaccagccgggcgtagtgctgcgtcgcaggcatgtcatccagacgctggttcacgtaggccagttgtcggatcagtgccggatcgtccggaagccctttatgcgccggttcgagcatttcccgcgactgtgcgatatcaccgctatcccacaaggcgtaaccaagcgctgcctgggtgttgctattattcggttccagttccagcgcggcgcgcaaatcactcaccgcggccgggacattatgacgttggcgataaattgtcgcccgcgcaacgtaagcgttggcagaaggcgcaatattgattgagcgcgtgagatcgttcagtgcgagttccggctgaccaggaatgtaacgttgcgcatgcagccaccagtagagggcattgcttcccagtccacgtttttctgcctgttgtagccagcgatcgcgagccgcaccatttcctgccgcctgggcggtattggcagcagcaagcagatcctcattgctcatgtcgtgaagactgattttctgccaggccgccagtgcggtggcgtagtcctcaacctgatacgcctgataggctaccgcacgatgttgccaggcgctcggttgtcgttgttcggcctgaagccatgcatacaacgccacaccgggtagcgtgtcccgataacactttgccagacggttccaggcggcggcatcgtaggaaggcgacatatcgcccagcaagcgaactattgccgggcaattatctgcaatacccggcaactgactttgccactgacgttgctccgccagcggtaagggtttcgataaaatcgccaccttcgccggcgttgccaggtaaggatgactttccagcagagacgccagtcgcgccattaaagtctggctgacacgcgcatcgccctggaaaggatagcgttgcagcaataaatcggcagcttcgcgtgactgctcgttctgcatcagttgccaggttagttgatccaggcgggtaagatttgccggttcttgctgatacagcaatcgtgccagacgcagagcttcagccttgttacgggtcgccacgctgacagcataacgctcctcaagcatttcattggcggggagggtggcgagcagtttttgcgctgcgtcgtactgaccttcttttaacagcaccggtagcgtcgcgccaacaacatactggcggttgtcggcaaactgtaccgtataattcgccaacgcctgaacggggttagcgctgtatttagataacagatagagccaacttttctcttgtgcgtccgtggtaaatagtggcttattttcaatgagataatgctggaggcgtgctttttcgccacgataagccagcgcggtcgcgtaagtaatatatgactgaggatcggtgaagatcccctgtgattgcagtgccaggatccgatcgtccagctgcccggcaagaagcacgtcaaaccactgacggcgttctgccgcgcttaatgtgttctgctggcgtgcttcattgtatagcgtatctgcctgggaccattgtttcaggtagattgcccgttgcagcagatcggttcgcagcgtttttccttccggcgatgcagcaaacgtcgcatcgttcagttgcgctctggcgacaggtaactgtgccagccgcagggcattctgcccgacttcactgcgacaacgcagggtcggcgcagcatcgcacgctttttgctgggcaagcagttcttcaactgtcgtaacgcttttcacttcaaccggaatagccgccagactgcgctcaagtcgggcatctcctgggtgacgtttcagttgatcctcaagcaacagccgcgcccggtcatcatgaccaaaatggcgataggcttccgcaaggtataaagtcagcggaatattatccggcacctgctggtgtatatattcaaattcgcggatggcggttgcttcgtcgttatttttctgtgccttcagcgctttatcgagacggggataaataacaaaatggcgataatcgctcagccccagctcttctgcgctggtgccgatattgtctgcgagtgcgctggtactcaataaagacgtcagcagtaaaccagaccatccgatgacgcgattaaggttattctccttcattttcggactccagttgcgcaacctgttctgtgtttaaacctgctttgagtaatagtgattgcatcgaaacttgtaattcgcgttgaattgtcaggacgcgatccaacgtttcctggctgataacgccttcggtgaccaaaaacttgccgagcggcagagaactgcgttcatggcgcaataacaacacgttaattgctgaacgattaatatgaccgagcgtggtcagtatttcggcgaacaggaactgatgcggcacatattgccgccagatttcaccggcctgctgttccgtgagccactgatgctgaaccgcattgtacaacattgcccgcggatcgtgaccgcgtcggcgtgcataccagtgacgtaaccctgtgacaatttgtccccgcagaacaatgacgtaacgcactttgcgtccgactttacgcgtcagggccgccagcgaaaccgggtcaataccatcttcactgccgacaattaactcgtcattttccagacgcagcggcagtaccgcataatgcagcgccacggaggccggcatttcggcaatcagcgaggaagggatctgccaggcatcgatggattcccacgccacgccgttttgctctgccagcgcctgtgccagctgctcggcgctaatcagcccctgcatcagcattgaaccgcccaggcgtagaccttcgacgcgattacgcagtgctgtatcgagttgttcttcagtgatgacctgattttccagcagaatttgacctaacgggcgcaacgagcgggtatcgccagtcacgctggggaagtcatgcgttgttttatcccacgccacgcgacgtggatcgccgtgttgaagtacctgttttagcgcgcgccagttggccatgaagttaatcaggttgccccagaaaagacgcaggacggaaagcagcccctgcgtcaggccgtagtagccagtaacgaaaatcacccgctgcacgatgcggttaaccatcaaaccaaagtttagccacagcagggtcattaaccatgcgctgccgctgaaaatagaaaggaaatgccaggcatcgggccacaaactttcatacgccagcaacagcaaaagctggatcatcaccagcatcgcgaggaagctgacaaagttactgattgcccctttgcggtcgcgccagagaaagtagttcagcgtcaggctggaggtccatttatgggttttaaagccttggaaaacaatgccgatgatccagcgggatttttgtcgaaccgcagtcgaaaaggtatcggggaaatattcgcgcacgcagatcatgtttgatgtccgcgcgtgctgtaaaaatttacgctgctcgcgttctttggcttcgtccaccaccggaaaacggacaaaaatttccgtcatacctttttctttcaggcggaagccaatgtcgtaatcttcagtaagactctgcacgtcgaaagcaataccgtcaccgtcagctaacagtgcggtcacggcgcggcggctgaaacaggtgccgacgcctgcgctgggcacttgtccggcgagggcttcacgcaccggaacatctttgccatgcagctctgaaaactcatcaatgtaagtcatgctggtgaagtgcgtccattcgcgttcgaacggatacaccgggatctgaatcagatctttacgctcgaccagatagttgaacagacgcaattccatcggtgaaatcacatcttcggcgtcatgcagaataaaaccagcaaaagcgaaattggcgctacgctcaaattgggtgatggcgtccagcacgttgttcagacagtcggctttgctggtggggccaggacgcgcgcagactaccttatgcacattcgggaagcgagcgcacacttcgtcaacatcacgctgagtatcggggtcgttggggtaggtgccaacaaagatatgatagttttcgtagtcgagcgtggtcgccgccagctcggccatattgccgatgacgcccgtttcattccacgccggaaccataatcgctaacggtttttcatctggtttatacagttcgcggtaactcattcgcgggtagcggcgataaacactcaacttgcgtttaatgcggcgtacccagtagacgacatcaataaaaaaatcgtccagcccgctgatgaacatgatgaccgctaacgttatcgcgattacttttaagccgtagagccaggtagcaaaaacatcaagaagccagtccacacaaaaaccttacattaacgctggttatgtttagggtggcgtatattaaggttttttatgaattgtgacagctttttaccattaataggtatgactattgcggcacgttatttttacactggttataaaagttgccgtttgctgaaggattaagcgggtaatgtgataacaaaccttgtcccccgcgcatccgacgttaccgcaaccgtgcctttatgcgcgacaacaatcgatttcactatcgccaggccaataccgctaccttcaccttttcgctggcgggaggggtcaacgcgatagaaacggtcaaacaatcgcggtaagtgctcgggcgcaatgggcgtaccggggttttcgacgataacttgcaccaggtgatcgaccgtctgacagcgcactacaattgtctctccggttggcgtataacgcagggcgttcgaaagcaggttgcttagcgcccgacgcagcatcagcggatcgcccgcgacctgacacttgtcgccaacaaaccgcaactccacgccgcgatcttccgctaacgcctcgaaaaaatcgaacactttgccgacttcatccgccaggttgagcattttcttttcggggattagctggttgttatcggcctgagcgagaaacagcatatcgctgaccattttcgccattcgcgtcagctcttcgagattagagtagagcacatcttccagctccttctggctgcgcgactggctgagggcgatttcggtttgcgttatgagattcgtaattggtgtgcgaatttcgtgagcgatatccgctgagaaattggactggcgggtaaagacatcctcaatacgctcgatcatatggttgaacgacagtaccagctgttccagctcaatgggcacggtctgcgggtcgaggcgaacgtcgagatctttcgaggtaatattctggatttgacggctgacgctgcggatcggcgcgtgacctttatgtaccgccaacagtacgataaagacgatcaggatgctgattaccgatgcggtcataataagtttattcatcaaatcatttatgtaatgaagatgaaaatcgatcgaaagcgcgatgtagagcgtataaatcggtttgccgtccaccaacgggccaaccggcaagttaatcatccgccagttgctgtgttccatatgcccgtgaccgtggcctggcatcatcatcgtcgggccggaaaggagatacacctcgccaccctgagcgtctttatcgggtatggcgtcacgcgtaaactcgcggatatccggcgcaccgggggagtgatacaccgttttaccctgactatctgccagggaaatcaacacattggaataaccactgacgatatcttccagcgtcattaagcgtcgggcttgcgtttcgtcagggtgatttagtacccgttcaagggtggcgctaatctcttttaaatcattaatatcctgctcggcaaaatgaacttttactgagtggatcatgatccatgcaaaggcgaaaaacgccgcgatggtggccaggctgataaaaaaggtcaggcgggttgccagcgaaaacgggcgctgaaatggcttactgaccatccggcacctcaagcatgtaacccacgccgcgcacggtctgaattagcttcggctcaaagtcgttgtcgattttgccgcgcagccgcttcaccgccacatcaatagcattggtatcgctgtcaaaattcatgtcccatacctgcgaggcgataagcgagcggggcagcacttcgccctgatggcgaaggaagaactccagcagagtaaactctttactggtcaaagtgatgcgcgtgccgctgcgggtgactttgcggctgacgagatcgaccatcaaatcggcaacctgaaactgactttcgataatcaccgccgccccgcgccgcagtaatgtgcgcacccgcgccagcagttcagcaaaagcgaatggcttcaccaggtagtcatctgcccccaactccagccccttgacgcgatgttcaatggtgccaagcgcggtaagcaacagaatcggcatccctttattggcggagcgtaacatgcgcacgatatcccagccgttcacgtccggcagcataatatcgaggattatcagatcataatcaccggtcatcgccagatggtagccattcagcccgttgtcggccaaatcgaccacaaaaccggcttcggttaaccctttggtcaagtattctccggttttcttttcatcttcgacaatcaacagtttcatatttcctccgcatgttgcccgggcaattctagagtagcgggatcagatggcaatcgcttattggcaaaatgacaattttgtcatttttctgtcaccggaaaatcagagcctggcgagtaaagttggcggcataaaatcaccagaaattatgagcctatgtctccttgtaaacttctgccattttgtgtggcccttgcgctaaccggttgttcactggcaccggattatcagcgtccggcaatgcccgtgccgcagcagttctcactcagccagaacggcctggttaacgcagcagataactatcagaacgcgggctggcgcaccttttttgttgataatcaggtgaagacgctgattagcgaggcgctggtgaataatcgggatttgcgcatggcgacgctgaaagtgcaggaggcacgggcgcaatatcgtctgaccgatgccgaccgctacccacagctcaatggcgagggcagcggcagctggagcggtaatcttaaagggaataccgccacgacacgggagttttcgaccggccttaacgccagctttgacctcgattttttcggtcgcttaaagaacatgagcgaagccgagcgacaaaattatttagccactgaggaagctcagcgcgcggtgcatattctgctggtttctaatgtcgcgcaaagctatttcaatcagcaactggcgtatgcgcaattgcaaatagccgaagaaacgctgcgtaattatcagcagtcatatgcgtttgtcgaaaaacaactgttgacaggtagcagtaatgttctggcgctggaacaggctcgcggggtgatagaaagtacccgcagcgacatcgctaaacgtcagggggaactggcgcaggcgaataatgcattgcaactgttgctgggaagctacggcaagctgccgcaagcgcagacagtaaacagcgacagcctgcaaagcgttaaattaccggcgggattgtcgtcgcaaatcttattgcagcgcccggatattatggaagctgaacacgcgttaatggcggctaatgccaatattggcgctgcacgcgcggcattttttccgtctataagcctgaccagcggaatatcgaccgccagtagcgatctatcgtcattatttaacgccagcagcgggatgtggaattttatacccaaaattgagatccccatttttaatgccggacgcaaccaggccaatctggatatcgccgaaattcgccagcagcagtcggtggtgaattatgaacagaaaatccagaacgcctttaaagaagtggcagatgcgctggcattacgtcaaagcctgaacgatcaaattagcgcccagcagcgttatctggcatcgctgcaaattactttgcaacgggcgcgggcattatatcagcacggcgcagtaagttatctggaagtgctggatgccgagcgttctttatttgcaacccgacaaactttacttgatctgaattatgcccgtcaggttaacgaaatttctttgtataccgcacttggtggcggttgacagcaatatactcgtcatacttcaagttgcatgtgctgcgtctgcgttcgctcaccccagtcacttacttatgtaagctcctggggattcactcgcttgtcgccttcctgcaactcgaattatttagagtatgacttttaactccaggagagaataaatgaaaaaagcactgcaagtcgcaatgttcagtctgtttaccgttattggctttaatgcccaggctaacgaacatcatcatgaaaccatgagcgaagcacaaccacaggttattagcgccactggcgtggtaaagggtatcgatctggaaagcaaaaaaatcaccatccatcacgatccgattgctgccgtgaactggccggagatgaccatgcgctttaccatcaccccgcagacgaaaatgagtgaaattaaaaccggcgacaaagtggcgtttaattttgtccagcagggcaacctttctttattacaggatattaaagtcagccagtaacccaggtttaatgagatgaaaaaaatcgcgcttattatcggcagcatgatcgcgggcggtattatttctgcggcaggttttacctgggttgcaaaggcggaaccgcctgcagaaaaaacgtcgaccgcagaacgtaaaatcttattctggtacgacccaatgtatcccaatacgcggttcgataaaccaggtaaatcgccgtttatggatatggatctggtgccgaaatatgccgatgaagagagttctgcgtctggtgtgcgcattgacccgactcagacgcagaatctgggggtgaaaacggctaccgtcacgcgcggaccgctgacttttgcccagagtttcccggcgaatgtcagttacaacgagtatcagtatgccattgtgcaggctcgcgctgccgggtttatcgacaaggtgtatccgcttaccgtgggcgataaagtacaaaagggcacaccgcttctcgacctgaccattcctgactgggtggaagcgcagagtgagtatttactgctgcgcgaaaccggcggtacggcgacccagactgaaggcattcttgagcggctgcgactggcgggaatgccggaggcggatattcgccgcctgatcgccacgcaaaaaatccagactcgctttacgctcaaagcgcccattgatggcgtgatcaccgcgtttgatctgcgcgcgggaatgaatatcgccaaagataacgtggtagcgaaaattcagggtatggacccggtgtgggtcactgctgcgatcccggagtctatcgcctggctggtgaaagatgcctcgcagtttaccctcaccgttccggcgcgaccggataaaacactcaccatccgcaaatggacgctgctacctggcgtggatgccgcgacccgcacgctgcagctgcgtctggaagtcgacaacgccgacgaggcgctaaaaccgggcatgaacgcctggttgcaactcaacaccgccagcgaaccgatgctgctcattccgtcacaagcgctgattgataccggcagcgaacagcgggtgattaccgttgatgccgacgggcgctttgtaccgaaacgcgttgctgttttccaggcatcgcaaggcgtcaccgcattacgctctggtctggcggaaggtgaaaaggtggtttccagcggcctgttcctgattgattccgaagccaatatttctggcgcactggagcggatgcgctctgaaagtgctacccatgcgcattgagggaataaccaatgattgaatggattattcgtcgctcggtggcgaaccgttttttggtgctgatgggcgcgttgtttctgagcatctggggcacctggaccatcattaatacgccagtggatgcgctgccggatctctccgatgtgcaggttattattaaaaccagctatcccggtcaggcaccacaaatcgttgaaaatcaggtgacttatccgctaaccaccaccatgttgtcggtgcctggcgcgaagactgtgcgcggtttctcacagtttggcgactcttatgtgtatgtcattttcgaagatggcaccgatccgtactgggcgcgttcgcgggtgctggagtacctcaaccaggtacagggtaagctgcctgcgggagtcagcgccgagctggggccagatgccacgggtgttggctggatctatgaatatgcactggtggatcgcagcggtaagcacgatctggccgatttacgctcattacaggactggtttctcaaatatgagctgaaaaccatccctgacgttgcggaagtggcgtcggtgggcggtgtggtgaaagagtatcaggtggttatcgatccccagcgcctggcgcagtatggcatcagtctcgccgaagtaaaaagcgcgctggatgcttcaaaccaggaagcgggcggttcgtcgatcgaactggcggaagcggaatatatggtgcgcgccagcggctatctgcaaacgctcgacgactttaatcacatcgttttaaaagccagtgaaaatggcgtgcccgtttatctgcgcgatgttgcgaaggtccagattggcccggagatgcgccggggcattgccgaactaaacggcgaaggcgaagtggcgggcggggtggtgatcctgcgatccggcaaaaacgcccgagaagtgatcgccgccgtgaaggacaaactggaaacgctgaaaagtagtctgccggaaggcgtggagatagttacaacatacgatcgcagccagctcattgaccgcgccatcgacaacctcagcggcaagttgctggaagagtttattgtggtggcggtagtctgtgcgctgtttctctggcatgtgcgctcggcgctggtggcgattatttcgttgccgctggggttgtgtattgcttttattgtcatgcacttccagggactgaatgccaatattatgtcgttgggtggcattgcgattgccgtcggggcgatggtcgatgctgctatcgtcatgatcgagaatgcgcataaacggctggaagagtggcagcaccagcatcctgacgccacgctggataataaaacgcgctggcaggtgatcaccgatgcgtctgttgaagtggggccggcgctatttatcagtctgctgattatcacgttgtcgtttatcccgatcttcaccctggaagggcaggaagggcgtctgtttggcccgttggcgttcaccaaaacgtatgcgatggcgggtgcggcgctgctggcgatcgtagtgatcccgatcctgatgggctactggatccgtggcaaaattccgccggaaagcagtaacccgctcaatcgctttttgattcgtgtttatcatccgctgttgctgaaagtactgcactggccgaaaaccacgctgctggtggcggcgctttcggtgctgacggttctctggccgctcaataaagttggcggggaatttttaccgcagatcaatgaaggcgacttgttgtatatgccatcgacgctgccggggatttccgcagcagaggcggcgagtatgctgcaaaaaaccgacaagctaattatgagcgtacctgaagtggcgcgggtatttggcaaaaccgggaaagcggaaaccgccaccgattctgctccgctggagatggtagaaacgaccatccagcttaagccgcaggagcagtggcggccaggcatgacgatggacaaaatcattgaggaactggataacaccgtgcggctgccggggctggcgaatctgtgggtgccgccaattcgtaaccgtatcgatatgctctcaaccggcattaaaagccccatcggcattaaagtttccggcactgtgctggcggatatcgacgcgatggctgagcaaattgaagaagtagcgcgaacggtgccaggcgtagcttctgcgcttgccgagcggctggaaggtgggcgctatatcaacgttgagattaaccgtgaaaaagccgcacgttacggtatgacggtggcggatgtgcagttgtttgtgacttctgcggtgggcggggcgatggttggcgaaacggtggaagggattgcccgttatccaattaatctgcgttatccgcaaagctggcgcgatagtccgcaggcactgcgccagctgccgatcctgacgccgatgaagcagcaaatcaccctggcagacgtggccgacattaaagtctctaccggaccgtcgatgctgaaaaccgagaatgcgcgcccgacgagctggatttatatcgatgcccgcgatcgtgacatggtgtcggtggttcacgatttgcaaaaagcgatagctgaaaaagtgcagttaaaaccgggcaccagcgtggcattctccgggcagttcgagctactggagcgcgccaaccataagcttaaactcatggtgccgatgacgttgatgattatcttcgtgctgttgtatctggcgttccgtcgggtgggcgaagcgttgctgattatcagcagcgtaccgtttgcgctggtgggcggcatctggttgctgtggtggatgggctttcatctttccgtggcgacgggcactggctttatcgccctcgccggggtcgccgccgaatttggcgtggtgatgctgatgtatttacgtcacgccatagaggccgtgccgtcgttgaataatccacaaacattcagcgagcagaagctggatgaggcgttatatcacggcgcggtcctgcgcgtgcgcccgaaagcgatgacggtggcggtgattatcgccggtctgctgccgattctgtggggaacgggggctggttcagaggtgatgagccggattgccgcgccgatgattggcggcatgatcaccgcacctttgctgtcgctgtttattatcccggcggcgtataagctgatgtggctgcaccgacatcgggtacggaaataaaagcaggataccccgtttaaccgtgtggattgtgtcttgcgacgatgggcactaaatgttaaaaggtgcccctcaacaaaaaagacacacaggggaaaggcgtgaaaaacgcgtcaaccgtatcggaagatactgcgtcgaatcaagagccgacgcttcatcgcggattacataaccgtcatattcaactgattgcgttgggtggcgcaattggtactggtctgtttcttggcattggcccggcgattcagatggcgggtccggctgtattgctgggctacggcgtcgccgggatcatcgctttcctgattatgcgccagcttggcgaaatggtggttgaggagccggtatccggttcatttgcccactttgcctataaatactggggaccgtttgcgggcttcctctctggctggaactactgggtaatgttcgtgctggtgggaatggcagagctgaccgctgcgggcatctatatgcagtactggttcccggatgttccaacgtggatttgggctgccgccttctttattatcatcaacgccgttaacctggtgaacgtgcgcttatatggcgaaaccgagttctggtttgcgttgattaaagtgctggcaatcatcggtatgatcggctttggcctgtggctgctgttttctggtcacggcggcgagaaagccagtatcgacaacctctggcgctacggtggtttcttcgccaccggctggaatgggctgattttgtcgctggcggtaattatgttctccttcggcggtctggagctgattgggattactgccgctgaagcgcgcgatccggaaaaaagcattccaaaagcggtaaatcaggtggtgtatcgcatcctgctgttttacatcggttcactggtggttttactggcgctctatccgtgggtggaagtgaaatccaacagtagcccgtttgtgatgattttccataatctcgacagcaacgtggtagcttctgcgctgaacttcgtcattctggtagcatcgctgtcagtgtataacagcggggtttactctaacagccgcatgctgtttggcctttctgtgcagggtaatgcgccgaagtttttgactcgcgtcagccgtcgcggtgtgccgattaactcgctgatgctttccggagcgatcacttcgctggtggtgttaatcaactatctgctgccgcaaaaagcgtttggtctgctgatggcgctggtggtagcaacgctgctgttgaactggattatgatctgtctggcgcatctgcgttttcgtgcagcgatgcgacgtcaggggcgtgaaacacagtttaaggcgctgctctatccgttcggcaactatctctgcattgccttcctcggcatgattttgctgctgatgtgcacgatggatgatatgcgcttgtcagcgatcctgctgccggtgtggattgtattcctgtttatggcatttaaaacgctgcgtcggaaataaggcattcacgctacatccgacaaaacgatgtcaaccatccgaaaccgctctcatccattcgatgagagcggtttttttaattactgcttaaatgcacccgccagagagcgaatatcattgccggttggcgactgatgaagtcgcagaccaaactcttcgacaatcgcaaatatgtgatcgaatatatcagcctgaatgctttcatattccagccacaccacggtgttagtaaacgcgtagatctcgagcggtaaaccgttatcacctggagccagttggcgtaccattaaggtcatatctttacgaatccgcggatggttacgcagatattcgttcagataggcacgaaaggttccaatattggtcattcggcgcagatttaataccgactccgtagaaccttgctggcgattccactcattaatttcctgatggcggctggttaaataaggctttaacaaatgcgctttattcagacgttgcatttcgtcttcatcaagaaaacgaatactggtgacatcaatactgatactgcgcttaatacgtcgcccgccagatgctgacatcccgctccagtttttaaaggagtcagaaaccagagaccaggtgggaatagtggtaatggtattgtcccagttacgcactttgacggtggttaacccaatatcgatcaccgcgccatccgcgccgtatttcggcatctccagccagtcgcccagtttcagcatatcgttcgcggaaagctgaatacctgccaccagaccaagaatcggatctttaaataccaacatcagcacggcagccattgcaccaagaccgctgatcagaatcgctggcgactgaccaatcagcagcgagatcatcaaaatgccgaccagaatcgcgccgatcagtttaatcccctgaaatatccctttcagcggtaactgagatgctgccgggaatttctgcgccagattcaaaataacatccagcaacgagaagactgaaagcagcgcatacatcatgatccacaactgcgcgcaggtagtcagaatatctgccgcttcggtgcctttttgcagccagaataccgcctgaatattgacgataatcccctgcagggtaaaagctaaacggtggaagagtttattctgggtaatgatttgcaaccaaagccgtgaactggcgatggcacgtttttcgaaggtccgcagtaccacccaatgcaaaataatatgcaccacgacggcggtcagaaaaataataccgaaaatcatcaccatcgaggtggtgtgatcgatctcaatacccgctaaatcttcaacctgggatattaaatcctgcataacgtctcctttatacaacagcagcctatgatgacggctgaaacagggttatgcaaatcaggagaatctgagaggaaatagccgggcagatgcccggcaagagagaattacacttcggttaaggtgatgttttgcggcagacgagatttcggcagcgtagcgttaaaatcttcaacgctgtgatgacctaccggaacaaccaccagactggtgtagcctttctctttcagaccaaattctgcatcgaggatggcggcgtcaaaaccttcgatgggtaccgcgtccagacccagagccgccacgccgagcaggaagttaccgacgttgagataaacctgttttgccatccactctgcatcatcatgcagatctttacggtgcatatcagcgaagaacttgcgacctttatcgttcgcggctttcgcttccggcgtggcaaagcggccatcggcatcttcctggtcaacaaccagcttcagccagacatcgtccatcgcggtttttgcacagaacaccacgacgtgcgaggcatcaagcattttacgctcgttgaacacgtaattaccggcagcggatttggcaacacgcgctttaccttcttccgtgctggcaacaataaaatgccacggctgggagttggtgctggatgggctgtattgcagtagcgttttgatctgctcggcctgttccggggtaagttttttgctggcatcaaatgccttagtggaatgacgctttaaggcgacagaaatgatatccataaagactccatgtgaaagtaattttgcgtgccagcagattacaaggttcaacgagaaatggtaagcgagaaaaatgcgctatagatttccgctttagcctggacgcactcttttttgatcgcgtttagccagaccatcaaccaccagattccacgaatcgttgatcagatcgcgaagtaacgcttcggagatttcttcgccgggatacactgaaatccagtgctttttattcatgtgataccctggcttaatgcttgggtatatttgctgatttaacagggatttttgtggatcggacttcagattgataaaggggacgccgcgtagctccgacgacagcataaaaatcttgccgccaattttaaaaacatcgaactccgggccaaaaggccagcaaagctcgacaaagggtaactcaagggccaggcgtttcgccgtttcgtgcagtgattgcttatccataaacgttcctttaggcgaaggagaataagcaaagtatgccgcgaagtacggcgataatcgacgtttaatccgccagcgagaaccagcgtcgccagataaagcgcagaacaaaatactcaatagcgcccagcactaaaaaccacagacaaaacaataaagtgtaaagctgactaagatccatcagatggaacatggtcaccagtttttgtgccagcgccagccccagtgcgggggcgggcagcagcaggcaagagaggaaagccatcagcaaaatgcctgctgcggtggtcaaggtttctaaagggtgtttcataacattgttaaatgtaagttaaaacaccattgtcagggatattcttctgtaaggcaattcccggcttagtcaccggcccagatctcacaatgctttttcaccagcccaatcagcgagccgccatcggcgacgaaatcgcgcattagctgcgcttcattcagaccgctgacgacctggcgatgcagggcctcaatcgcgctcgatgcaccaattttatgtgcggaaggggcgattttttccagcaatcgcaaggtatcttccgttagcggtcgacgatctccagtgtgcggatcggtgatgacgccttcaagcccatagcgacaggcctggaaacggttgaatttatacagcaggtaatctttttcctgatgtttaaacgggcgttccgtcagtaaccagtgggcggtagcctgaattaatcccgccatatttactgcgtggctaagggttaacggggtatccatcacccgaacctccaccgtgccaaaatgaggactggggcgaatatcccagtgcagatctttaatgctgtcgatcatcgtggtgtaactcagacagcgaaacagggcttcaaattgttgccagttactgacccacggcatcgggccattatcaggaaaggcggaaaaaatattcggtcgtgaggaggcaaaacgcgtatccgttccctgcatatatggcgacgcggcggaaagggcgataaagtgcggcacaaatcgtgacaagccgtgcagcaaataaatggcgtcatcgccactggcgcagccaacatggacatgctgaccaaaaacggtcgcctgctgaatgagataaccaaagttttccagcgtgcgttgatagcgttcgttatcgcatacctcctgacgctgccatttctgaaacgggtgcgtgccaccgccgcaaatttccagatgatggtctgtggctgcctgcaatacgactttctgcatcgctgaaaactgcccggcagcctggttgatatcacggcaaacatccgtcgccagctccagcatactttcggtgatatcgtgctttacctctccggccgtgatcttatttttaaccgcgtcaatcagcattgaagagtcctggcttaagtcatagcccggcggattaaccacctgcatttccagttcaataccgagggtaaaaggttcagaaacatgaaaatcgggtaatggcataggtttctcttatgttggcgttttctattcagtatagaagtcggagcggctgggcgagatgcggaagttctggaatgtttcttttttttggtgatggtgaactgatggtgcctgaagcaatttggctacttttgcaatgtgacaagttatggcagtgctgactggtggcgaagaattttgacgattgagtcatgcagaaaaaaacgggttcagcttcagttgattaaatgaggagtgagaagtccgaaacaggactcactgtataaataaacagctattttgttgaggaagggtaagataacggcgggtgcctgaagctttccggtttcaggtttactctgaggtctggaaagatgaagccccaggagatatttctatcaaccctggggctgccactccaaacccgaacaatttggatggtagtcccttcttcgcatggaggcaatataaacatgctgacgaaatatgcccttgcggcagtcatagtgctgtgtttaacggtgctgggatttacgcttctggtcggagactcgctgtgtgagtttacggtgaaggaacgtaatattgagtttaaggctgttctcgcttacgaaccgaagaagtagccgttgtgcggggagtaatcccataagcgctaacttaagggttgtggtattacgcctgatatgatttaacgtgccgatgaattactctcacgataactggtcagcaattctggcccatattggtaagcccgaagaactggatacttcggcacgtaatgccggggctctaacccgccgccgcgaaattcgtgatgctgcaactctgctacgtctggggctggcttacggccccggggggatgtcattacgtgaagtcactgcatgggctcagctccatgacgttgcaacattatctgacgtggctctcctgaagcggctgcggaatgccgccgactggtttggcatacttgccgcacaaacacttgctgtacgcgccgcagttacgggttgtacaagcggaaagagattgcgtcttgtcgatggaacagcaatcagtgcgcccgggggcggcagcgctgaatggcgactacatatgggatatgatcctcatacctgtcagttcactgattttgagctaaccgacagcagagacgctgaacggctggaccgatttgcgcaaacggcagacgagatacgcattgctgaccggggattcggttcgcgtcccgaatgtatccgctcacttgcttttggagaagctgattatatcgtccgggttcactggcgaggattgcgctggttaactgcagaaggaatgcgctttgacatgatgggttttctgcgcgggctggattgcggtaagaacggtgaaaccactgtaatgataggcaattcaggtaataaaaaagccggagctccctttccggcacgtctcattgccgtatcacttcctcccgaaaaagcattaatcagtaaaacccgactgctcagcgagaatcgtcgaaaaggacgagtagttcaggcggaaacgctggaagcagcgggccatgtgctattgctaacatcattaccggaagatgaatattcagcagagcaagtggctgattgttaccgtctgcgatggcaaattgaactggcttttaagcggctcaaaagtttgctgcacctggatgctttgcgtgcaaaggaacctgaactcgcgaaagcgtggatatttgctaatctactcgccgcatttttaattgacgacataatccagccatcgctggatttcccccccagaagtgccggatccgaaaagaagaactaactcgttgtggagaataacaaaaatggtcatctggagcttacaggtggccattcgtgggacagtatccctgacagcctacaaaacgcaattgaagaacgcgaggcatcgtcttaacgaggcaccgaggcgtcgcattcttcagatggttcaacccttaagttagcgcttatgggagtaatccccgcatatccggttgtcaggtcaggatggtaaggcacctgctttacactttcgcccgtggtcagtgatggctgcgggcgaatcgtaccagatgttgtcaattaatcgtgttggcacagcgttatgactatcttttcttttatctgccagtgcacagcaaacatctcattctcacgatgaatgatgacctgctgtttattccagctaattatctgatagtccagaaaacctgcatcagtttggatctcacttgccttaaatgcgctctctttggcggaaaatgccagtgtcagcgccagagaaaaggctaaaccgcagtctgcgagtcgctcgtgttccgctggtgtaataatgttgtctgtcaattctcttgcggtttgtacagaaaaaatttcttctatatcaatgccaatcggttgacgagataccacggctaatgccgtagtcccacagtggctaatactgccgtatacctccgcaggccagacaggttggcgtagctcgccgattgcgggcacacatttatagccatattcccgcaaagcataaacagcagcgatccgtccggctaaatgctctgttttacgtttacgtccagcgtgttgcagttgtgcgtagtgcggcagccagagtaaatcctgctcacaaaaattcgccggatcgaactcaacaaaatgcagcgtatgtccggcaaaggggagggaggtatgcgtagttttcatatcgaccatattcgagactgatgacaaacgcaaaactgcctgatgcgctacgcttatcaggcctacatggtcctgcaatatattgaattggcaagatttttgtaggccggataaggcgttcacgccgcatccggcatgaacgacgcgcactttgtcaacaatctgacgttagcatcagaagtgggtgtttacgctcatataccacgtacgtcccggctcgttataggtatacgccccggcaccggcgatatagttggcccctgccaaatcgcccgtggtctgggcattacccgcacgccacaaacgtttgtcgaacagattgtccacgccgccggtcagactgacattcttcgtcacatcccaggtcgcgctcaggccaacaatgctgtaaggactaatttctttggtttccggtccaaccgctggctgacctttatagttgtacttcttcggctgctgcttgccgtaccaggtgaaggtcgtttgcatcgacaaatcttcccgtgcctgccagctcagcgttgagttcaacgtatactccgggatgatcgacaaacggtcgcccgtggttttgttttcactcttcagcatataagtgatgttattggtccacatcaccgtttcgctaaccggtacgtttaacgatccttccagaccttcaaccaccgctttcggcacgttatcccactgatagagatcggtgccgactgcgttttgccctacagccacatagcccgcttcaatcttattgcgataatcgttacggaaccaggtgacgcccgccagccacccgtcgcgtttgaactccagaccaatctctttgttgatgctggtttctgctttcaggtcatcgttaccttgcagatagcagccgcccgcgctggcatagcaaccctgacctttactgtagagaatgtagttcgggttagtctggtacaggctcggcgctttataagcacgggcgatgcccattttcagcgtgaagtcatcgcctaaaccttgcgatatgttcagcgccgggctccagttattgccgacaatactgtgatgatcgaaacgcagccccggcgttacgatggtgctgtcagtcagctccatgttgttttcggcaaacagcgagaaaatttctgcttttgaatacgggctacggtcggtggtactcacgccatcaatagcgccaccggtattcgttccggtcagtgcctgggtgttggaacttaagtccttcatccgttgctgattccactccgtacccagcgtcagcgtctggttaacgaggaaatcaatcggcaggttaacttcgctgtgcagcatcacgtcatcaagatcgatatcgacgaaatcctgtgtcgctttttcgttaaatttcccttcggtaccgcccgccagaccttccggaatacgcgagttacgggtgtgttcgtactgcacccagttgctggtggtcacgccgttatcccagccaccgttccaggtcagcgcgtagttctggcgatacagacggttggtttcatcgccatatttcgagcgggtataggaatcggagttggtattctgggtgtcgcccgcatacaggttaccctggcggctgtaacctgcttccagttccagcgattgcaatggcgcgaaatcccagcgcaccacgccattaatatctttgttgattaccccttcgcgcccggctggtaacgtcgtggcatacgttccggcacgcgcggactgatggccctggttgatatcccacgcgtcagcctgggttttgtcgaggttgccatacaaacggaagctgaattcgtcgcccagcggaccggtcaggctaaagttagtgcgtttggtggcaccttcctctttatgttctggcgcattgaaatatgcgtcccaggagccgtgccactcgccgctgccttttttggtaatgatgttaaccacgccgcccgccgcgccgttgccataacgcgcagctgccggaccacgcagaacttcaatacgttcaatcatttcaggtggcacccaggaagtatcaccacgggtatcgcgctcgccacgccagccctgacgcaccgagttacggctgcttaccggcttgccgtcaatcaaaatcagcgtgttttccggacccataccgcgaatatcaatctgtcggttattcccacgctgaccactggtggagttaccggtcaggttaacgcctggcatggtacggatgatcttcgacacatcgcgggcaaccgggtttttgcggatttcatctgcggtgatggtcgaaacgccaggcgcctgtaagttctgctcggcggcggtaacgacaatagtatcgtcatgtgaaacaggagtatcggtcggctcttgtgcctgcgctaccccataaatccccagattgaccaacaaggccagggaatgaatcttcttgttcattgttttattcctgcatttttgccacgaattgcaactgtcgggcatggtcgtcatcaacacgacgcatcccgctaccgcgaaaacctttgatcctgaaagacacgcagtgcagttggttaattaatgtccgcgcttcccacggcgcgccattacgctattgcaaatgcaaatagttatcaataatattatcaatatatttctgcaatcaatgaaaaattgcacagtaaacatggggttatggtgtgacggcgttaaaagtaggaagtgagagctggtggcagtcgaaacatggcccggaatggcagcgtctgaatgacgaaatgtttgaggtcactttctggtggcgtgatccccaaggttctgaagaatactcgacgataaagcgcgtatgggtctacatcactggtgtgaccgatcaccatcagaacagccagccccagtcgatgcagcgaattgcaggcactaacgtctggcagtggacgacacaactcaatgccaactggcgcggcagctactgctttattcccaccgaacgcgatgacattttttctgtaccatcccccgatcgcctcgaattgcgcgaaggctggcgaaaactattaccccaggcgatagccgatccgctgaacctacaaagctggaaaggcgggcgagggcacgctgtttctgcactcgaaatgccgcaagcgcctctgcaaccgggatgggattgtccgcaagcgccagaaatacctgccaaagaaattatctggaaaagtgaacggttgaaaaagtcacggcgtgtatggatttttaccaccggcgatgcaacagcagaagaacgcccgctggcagttttgctcgatggcgaattttgggcgcaaagtatgcccgtctggccagtgctgacttcgctgacccatcgtcagcaacttcctcccgccgtgtatgtgttgatcgacgctatcgacaccacgcaccgcgcccacgaactgccgtgtaatgcggatttctggctcgcagtacagcaagagttattacccctggtgaaagctattgccccttttagcgatcgtgccgatcgcaccgtggttgccgggcagagttttggtgggctttccgcgctgtatgccggactgcactggcctgaacgctttggctgtgtattaagccagtcaggatcgtactggtggccgcatcggggcgggcagcaagagggcgtgttacttgaaaagctaaaagctggtgaagttagcgccgaaggtctgcgcattgtgctggaagcgggtattcgcgagccgatgatcatgcgggccaatcaggcgctgtatgcgcaattacaccccataaaagaatccattttctggcgtcaggttgacggcggacatgatgcgctttgttggcgcggtggcttgatgcaggggctaatcgacctctggcaaccacttttccatgacaggagttgaatatggcattcagtaatcccttcgatgatccgcagggagcgttttacatattgcgcaatgcgcaggggcaattcagtctgtggccgcaacaatgcgtcttaccggcaggctgggacattgtgtgtcagccgcagtcacaggcgtcctgccagcagtggctggaagcccactggcgtactctgacaccgacgaattttacccagttgcaggaggcacaatgagccagcatttacctttggtcgccgcacagcccggcatctggatggcagaaaaactgtcagaattaccctccgcctggagcgtggcgcattacgttgagttaaccggagaggttgattcgccattactggcccgcgcggtggttgccggactagcgcaagcagatacgctgcggatgcgttttacggaagataacggcgaagtctggcagtgggtcgatgatgcgctgacgttcgaactgccagaaattatcgacctacgaaccaacattgatccgcacggtactgcgcaggcattaatgcaggcggatttgcaacaagatctgcgcgtcgatagcggtaaaccactggtctttcatcagctgatacaggtggcggataaccgctggtactggtatcagcgttatcaccatttgctggtcgatggctttagtttcccggccattacccgccagatcgccaatatttactgcacatggctgcgtggcgaaccaacgcctgcttcgccatttacgcctttcgctgatgtagtggaagagtaccagcaataccgcgaaagcgaagcctggcagcgtgatgcggcattctgggcagaacagcgtcgtcaactgccgccgcccgcgtcactttctccggcacctttaccggggcgcagcgcctcggcagatattctgcgcctgaaactggaatttaccgacggggaattccgccagctggctacgcaactttcaggtgtgcagcgtaccgatttagcccttgcgctggcagccttgtggctggggcgattgtgcaatcgtatggactacgccgccggatttatctttatgcgtcgactgggctcggcggcgctgacggctaccggacccgtgctcaacgttttgccgttgggtattcacattgcggcgcaagaaacgctgccggaactggcaacccgactggcagcacaactgaaaaaaatgcgtcgtcatcaacgttacgatgccgaacaaattgtccgtgacagcgggcgagcggcaggtgatgaaccgctgtttggtccggtactcaatatcaaggtatttgattaccaactggatattcctgatgttcaggcgcaaacccataccctggcaaccggtccggttaatgaccttgaactggccctgttcccggatgtacacggtgatttgagtattgagatcctcgccaataaacagcgttacgatgagccaacgttaatccagcatgctgaacgcctgaaaatgctgattgcccagttcgccgcggatccggcgctgttgtgcggcgatgtcgatattatgctgccaggtgagtatgcgcagctggcgcagctcaacgccactcaggttgagattccagaaaccacgcttagcgcgctggtggcagaacaagcggcaaaaacaccggatgctccggcgctggcagatgcgcgttacctgttcagctatcgggaaatgcgcgagcaggtggtggcgctggcgaatctgctgcgtgagcgcggcgttaaaccaggggacagcgtggcggtggcactaccgcgctcggtctttttgaccctggcactccatgcgatagttgaagctggagcggcctggctaccgctggataccggctatccggacgatcgcctgaaaatgatgctggaagatgcgcgtccgtcgctgttaattaccaccgacgatcaactgccgcgctttagcgatgttcccaatttaacaagcctttgctataacgccccgcttacaccgcagggcagtgcgccgctgcaactttcacaaccgcatcacacggcttatatcatctttacctctggctccaccggcaggccgaaaggggtaatggtcgggcagacggctatcgtcaaccgcctgctttggatgcaaaatcattatccgcttacaggcgaagatgtcgttgcccaaaaaacgccgtgcagttttgatgtctcggtgtgggagtttttctggccgtttatcgcaggggcaaaactggtgatggctgaaccggaagcgcaccgcgacccgctcgctatgcagcaattctttgccgaatatggcgtaacgaccacgcactttgtgccgtcgatgctggcggcatttgttgcctcgctgacgccgcaaaccgctcgccagagttgcgcgacgttgaaacaggttttctgtagtggtgaggccttaccggctgatttatgccgcgaatggcaacagttaactggcgcgccgttgcataatctatatggcccgacggaagcggcggtagatgtcagctggtatccggcttttggcgaggaactggcacaggtgcgcggcagcagtgtgccgattggttatccggtatggaatacgggtctgcgtattcttgatgcgatgatgcatccggtgccgccgggtgtggcgggtgatctctatctcactggcattcaactggcgcagggctatctcggacgccccgatctgaccgccagccgctttattgccgatccttttgccccaggtgaacggatgtaccgtaccggagacgttgcccgctggctggataacggcgcggtggagtacctcgggcgcagtgatgatcagctaaaaattcgcgggcagcgtatcgaactgggcgaaatcgatcgcgtgatgcaggcgctgccggatgtcgaacaagccgttacccacgcctgtgtgattaaccaggcggctgccaccggtggtgatgcgcgtcaattggtgggctatctggtgtcgcaatcgggcctgccgttggataccagcgcattgcaggcgcagcttcgtgaaacattgccaccacatatggtaccggtggttctgctgcaacttccacagttaccacttagcgccaacggcaagctggatcgcaaagccttaccgttgcctgaactgaaggcacaagcgccagggcgtgcgccgaaagcgggcagtgaaacgattatcgccgcggcattctcgtcgttgctggggtgtgacgtgcaggatgccgatgctgatttcttcgcgcttggcggtcattcgctactggcaatgaaactggcagcgcagttaagtcggcaggttgcccgccaggtgacgccggggcaagtgatggtcgcgtcaactgtcgccaaactggcaacgattattgatgctgaagaagacagcacccggcgtatgggattcgaaaccattctgccgttgcgtgaaggtaatggcccgacgctgttttgtttccatcctgcgtccggttttgcctggcagttcagcgtgctctcgcgttatctcgatccacaatggtcgattatcggcattcagtcaccgcgccccaatggccccatgcagacggcggcaaacctggatgaagtctgcgaagcgcatctggcaacgttacttgaacaacaaccgcatggcccttattacctgctggggtattcccttggcggtacgctggcgcagggtattgcggcgcgactgcgtgcccgtggcgaacaggtggcatttcttggcttgctggatacctggccgccagaaacgcaaaactggcaggaaaaagaagctaatggtctggacccggaagtgctggcggagattaaccgcgaacgcgaggccttcctggcagcacagcagggaagtacttcaacggagttgtttaccaccattgaaggcaactacgctgatgctgtgcgcctgctgacgactgctcatagcgtaccgtttgacggtaaagcgacgctgtttgttgctgaacgcacacttcaggaaggtatgagtcccgaacgcgcctggtcgccgtggatagcggagctggatatctatcgtcaggattgtgcgcatgtggatattatctctccagggacgtttgaaaaaattgggccgattattcgcgcaacgctaaacaggtaaattaatattatttataaacccataattacagaaaataattatgggttttttatttgtttgatttataggtttgatgaatatttctcttaaatagagtgaatgttgcattcagtggaaggaatttacaaacttcagcttcggataattatcaccaactggtaaagtgagcgccgtggagatttccccctattggactcattttcaggttataccccatgtcatcactgaatattaaacagggaagtgacgctcattttcccgattatcctctggcgtcgcccagtaataatgaaattgatttacttaatctaatctcagttttatggcgggccaaaaaaacggtcatggcggtcgtttttgcgtttgcctgcgcaggcttgctgatctctttcatcctgccgcaaaaatggaccagcgcggcggttgtcacgcctccagaacctgttcagtggcaagagttggagaaatcattcactaagcttcgtgtgctggatctggatatcaaaattgatcgtacagaagcatttaacctgtttatcaagaagtttcagtcggttagcttgctggaagagtacctgcgttcatcaccttatgtgatggaccaattaaaagaggcgaaaatcgacgaactggatttgcatcgcgcaattgtcgcattgagcgaaaaaatgaaagcggttgatgacaatgccagtaagaaaaaagatgaaccgtcactgtatacctcctggacgctaagttttaccgcgccaaccagtgaagaggcgcagaccgttttgagcgggtatatcgattatatctctacgttggtggtgaaagagtcgctagaaaacgtccgtaataaactggagatcaaaacccagtttgaaaaagaaaaactggctcaggatcgcattaaaacgaaaaatcaacttgatgcaaacattcagcgcctcaattattcactcgacattgccaacgcggcaggaattaaaaagcccgtttacagtaatggtcaggccgttaaagatgaccccgatttttctatttctctcggtgcagacggtattgaacgcaaactggaaatagaaaaagcggtcactgacgttgcggaactgaacggtgaattacgtaatcggcagtatcttgtcgagcaattaacaaaagcacatgtcaacgatgtgaattttacgccgtttaaatatcagttaagcccgtcattgccagtgaaaaaagacggtccgggtaaggcgattattgtgatcctttccgcgttgatcggcgggatggtggcttgtggtggcgtgctgttgcgctatgcgatggcatccagaaaacaggatgccatgatggcagaccacttagtttaactatttgcggttgaaggtgccgttcgtccgagcggcaccacaagcggcgttccggcaactggatcgtcaatgatcatgcagcgcagaccataaatgcgctcaatcagttcagcagtgacaatctccttcggcgctccctgagcaacaattttcccttcccgcaatgcaatcaaatggctggcgtaacgacaggcctgattaagatcgtgcagcaccgccgccagggtatagcctttttcgcggttcagttcgcttaacaactccagcaaatcaatctgatgactgatatccagccaggtcgtgggttcgtcgagcagcataattgccgtttcctgggccagcaccatcgcgatccacgctcgctggcgttgtccgccagaaagggtatccacgctttgatctgccagatgagttattcccgtggcctgcattgctttcgttaccgcttcttcatcctctttgcgccagcgggtaaacagcggttgatgcggataacgtccacgcgccaccagctcctgcacggtgatatcgcccggcgtggtagcattttgcgccaacagaccaatccggcgtgcaacctctttactggcgtaatgttgaatgtgctcgccatccagccagacatgcccatgagcaggcgtcatcaggcggcttaaggtacgcagtaacgtggatttaccgcagccatttggcccgataattgccgtgaagtgaccatcaggtatttctacagtcagattttccgcaacggtatatttgccatatcccagggttaactgttcgccgcgcaaacgggctactgattcggtcattttttgcgagactcctgaattaacaagacgataaggtaaataccgccgaggctgacggtaacgacgccaaccggaagttgatacggcataaacagttgttgggcgcagagatcggccgccagcagtaacagcgccccgcatagcgccgcctgggttagcccccagcgagcggtgccgctaatgcgtcgggcaatgtgcggtgcgactaaagcaataaaggaaatcggcccggcaagcgctgttgccgcagcggtaagcaccactgcaaccagcatcattaacagacgcgaacgttcgacgctgacgcccagcgcacacgcggtatcatcgcccatttccagcaagcgcatccggcgtaccagtaaggcggcggcaatgagcatcaatataatgatgggtgcggaaggcgaggtttttgcccacgtcaggccgttgagcgatccggcattccacaaacctgctgttagcgccgtttctaaagacgctttcagcaacagccaggtattaaaggccaccagcatggcgcgaacgccgataccgataataatcaaccgaaaggtgtcgatgccgttgcgccaggcgagcagccagaccagcagcgaagtgacaatgccgcccaccattgctgacagcgcgatagccgtcaggtcctgaccaaacagcaccatcgccaccagcacgccgctccacgccccggtgttaaagcccattacgtcagggctgccgagcgggttacgcatcagcgactgaaaaatcgcgccactgacgcccagtgctgcgccaatcaacagcgccatcagcacgcgtggtaaacgccattcggtgaccaccatcgtcatactgcgcggcgcatcgcccatcagcgcggcgaatacctgcgaggtttccagcgtgacggcaccgctgcgtaatccccagatacctgcaaccacacaggcggaaaccagcagcaaacaggtgatgagtaatcggcgagagacgtaaatcatgcaccacctcgcgttttacgtcgcacgaggaagatcagcaccggtgcaccaataaacgcactgaccacagaaacgcgcagttcgccgggcacaatcacccgcccgatgatatcggcaaacagcagcagggcaggggtagcaagtagcgtgacgggcagcgaccagcgatgatcggcacccaccagccaacgcgccatatgcggcatcatcaggccaataaaggcaatcgggccaactattgccgtcgcactaccacaaagcacggtaatcgccagcagaccaatcaactgtgtgcgcgccacgcgactgcccagcgccgtcgcggtgtcgctgccgaggctcaaactgttcagcgcgcgactcagtaatagcgcagttgctccggcgatcagcaccgggatcagcaccacttttaaggtatgtagattgcgaatatccagcgaaccggcttgccagaaacgcaactgatcgtagacgtcaggattaagcagggcgatgccgctggtcagtccttccagcaccgccgccagcgccacgcccgccagggttaaacgcaccggacttaactgcccgccgccctgactgccggtaaaggcaacaatcaatgaggccaccagcgccccggcgaaggccatcgccagttgttcctgcgcggaagagtaaccaaacagcgccgcacccagcacaatggcaaagctggctccggcgttcacgccaagcaagccggggtcggcaagtgggtttcgggtgagggtttgcattaacgccccggcaaggccaagcgcgccgcctgccagtaaaccggcaagggtacgcggcagccgcgcgtcgagcacgatggtgcagtcggcgctctggcaggtgccggagaaggcctccagcactacggaagcggggagtgattttgccccaatgagcaggcttaatgccgtcgcgataatcagtaataacagcaatccgggcacggcaatggcgcgtgtcacggcaacagaaccagacatacgaacttccatgataatgaaattaattatcgttatcgatcttatttggatatgttagcatgtgcagcctaagaataggtatttaaaatatttgatggcaaggcattgtaatgaataaacaatcctggctgcttaacctcagcctgttgaaaacgcacccggcgtttcgcgcagtattcctcgctcgtttcatctcaattgtgtctctgggtttgctcggcgtcgcggtgccggtgcagatccagatgatgacacattccacctggcaggtggggctttcggtgacgctgaccggcggcgcgatgtttgttggcctgatggtcggcggtgtgctggcggatcgctatgagcgcaaaaaagtgattttgctggcgcgcggcacctgtggcattggcttcattggactgtgccttaatgcactgctgccggagccgtcattgctggcaatctatttacttggtttatgggatggttttttcgcatcgcttggcgttacggcgctattggcggcgacaccagcactggtagggcgtgaaaacttaatgcaggccggggcgatcaccatgttgaccgtgcgtctggggtcggtgatttcgcccatgattggcggtttattgctggcgaccggtggcgtagcctggaactacgggctggcggcggcgggcacgtttattaccttgctaccgttgttaagccttccggcgttgccaccgccaccgcagccgcgtgagcatccgttgaaatcattactggcaggatttcgttttctgcttgccagcccgctggtgggcgggattgcgctgctgggtggtttattgacgatggcgagcgcggtgcgggtactgtatccggcgctggctgacaactggcagatgtcagcggcacagattggttttctctacgcggcgatcccgctcggcgcggctattggtgcgttaaccagcgggaagctggcacatagtgcgcgaccagggttattgatgctgctctccacgctgggatcgttcctcgccattggtctgtttggcctgatgccgatgtggattttaggcgtggtttgtctggcgctgttcggctggttgagtgcggtcagctcgttgctgcaatacacaatgctgcaaacgcaaaccccggaagcgatgttagggcggattaacggtttgtggacggcgcagaacgtgacgggcgatgccataggcgcggcgctgctgggtggtttgggcgcgatgatgacaccggttgcttccgcaagcgcgagcggttttggtttgttgattatcggcgtgttgttattgctggtgctggtggagttgcgacattttcgccagacgccgccgcaggtgacagcgtccgacagttaatgcttaaaacagcgccttaagcctatccagcacttgcatggcgctgtagtaatccagacggaacgtctcggttcccagcgcataaacctgcttgttttgtactgcaggcaggtgcgcgagcagcggattagcataaatagcatcggcatctttctgatcaccggcgaacaggaatagtgactcgccatttaaccctgcagccagattttccccaccaagctgaatgatgtcatggcgtttaccctgactttggctggcatttaaccctgcgggtaacttcgccagcgtaaagccgagttgttccagcatctgcccttgtgctgattctggcgtccagagattggcactgtgtgcagcggcagtatagacaatggcagtgaccggctgcggcggtaatttgatttgctctttcgccgccgccagttgcttatcaaactgcgcaatccgctctgccgcttgtttctcatgcccggtaatttcgccaagttgcgttaacagcgactgccagcttttgtcgtcgtaattgatgattaatgtcggggcgatggtggaaagctgatcatacagtgccagcgccgaatccccgccggttgcgctaattaaaatcagatccggcatttgcgcggcaacggcttcggcgctcggttcgccgatatagagccgttgcagtttgcgttctttcgccaccttgctccactggcgtaaaaagccctggtcatccgcgacgcggttattcggcgtggtcgcgccgctggcgatcaccggagcatcaatcgccagcagtgagccggtcagggtgacgctggtggaaacaatacgctgcggctggctttccagtgtatgtgtgccacggctgtcagtaatctgacgcggccagtcagcggcctgaactgcggctattcctgaaagcaaaagtcctgttaatagaagggcgttgcggtagagcggggcgagtctcacaaatcagcttcctgttattaataaggttaagggcgtaatgacaaattcgacaaagcgcacaatccgtcccctcgcccctttggggagagggttagggtgaggggaacagccagcactggtgcgaacattaaccctcaccccagccctcaccctggaagggagagggggcagaacggcgcaggacatcacattgcgcttatgcgaatccatcaataatgcttctcattttcattgtaaccacaaccagatgcaaccccgagttgcagattgcgttacctcaagagttgacatagtgcgcgtttgcttttaggttagcgaccgaaaatataaatgataatcattattaaagcctttatcattttgtggaggatgatatggatacgtcactggctgaggaagtacagcagaccatggcaacacttgcgcccaatcgctttttctttatgtcgccgtaccgcagttttacgacgtcaggatgtttcgcccgcttcgatgaaccggctgtgaacggggattcgcccgacagtcccttccagcaaaaactcgccgcgctgtttgccgatgccaaagcgcagggcatcaaaaatccggtgatggtcggggcgattcccttcgatccacgtcagccttcgtcgctgtatattcctgaatcctggcagtcgttctcccgtcaggaaaaacaagcttccgcacgccgtttcacccgcagccagtcgctgaatgtggtggaacgccaggcaattccggagcaaaccacgtttgaacagatggttgcccgcgccgccgcacttaccgccacgccgcaggtcgacaaagtggtgttgtcacggttgattgatatcaccactgacgccgccattgatagtggcgtattgctggaacggttgattgcgcaaaacccggttagttacaacttccatgttccgctggctgatggtggcgtcctgctgggggccagcccggaactgctgctacgtaaagacggcgagcgttttagctccattccgttagccggttccgcgcgtcgtcagccggatgaagtgctcgatcgcgaagcaggtaatcgtctgctggcgtcagaaaaagatcgccatgaacatgaactggtgactcaggcgatgaaagaggtactgcgcgaacgcagtagtgagttacacgttccttcttctccacagctgatcaccacgccgacgctgtggcatctcgcaactccctttgaaggtaaagcgaattcgcaagaaaacgcactgactctggcctgtctgctgcatccgacccccgcgctgagcggtttcccgcatcaggccgcgacccaggttattgctgaactggaaccgttcgaccgcgaactgtttggcggcattgtgggttggtgtgacagcgaaggtaacggcgaatgggtggtgaccatccgctgcgcgaagctgcgggaaaatcaggtgcgtctgtttgccggagcggggattgtgcctgcgtcgtcaccgttgggtgagtggcgcgaaacaggcgtcaaactttctaccatgttgaacgtttttggattgcattaaggagcgaggatgagcattccattcacccgctggccggaagagtttgcccgtcgctatcgggaaaaaggctactggcaggatttgccgctgaccgacattctgacgcgacatgctgcgagtgacagcatcgcggttatcgacggcgagcgacagttgagttatcgggagctgaatcaggcggcggataacctcgcgtgtagtttacgccgtcagggcattaaacctggtgaaaccgcgctggtacaactgggtaacgtcgctgaattgtatattacctttttcgcgctgctgaaactgggcgttgcgccggtgctggcgttgttcagccatcagcgtagtgaactgaacgcctatgccagccagattgaacccgcattgctgattgccgatcgccaacatgcgctgtttagcggggatgatttcctcaatactttcgtcacagaacattcctccattcgcgtggtgcaactgctcaacgacagcggtgagcataacttgcaggatgcgattaaccatccggctgaggattttactgccacgccatcacctgctgatgaagtggcctatttccagctttccggtggcaccaccggcacaccgaaactgatcccgcgcactcataacgactactactacagcgtgcgtcgtagcgtcgagatttgtcagttcacacaacagacacgctacctgtgcgcgatcccggcggctcataactacgccatgagttcgccaggatcgctgggcgtctttcttgccggaggaacggttgttctggcggccgatcccagcgccacgctctgtttcccattgattgaaaaacatcaggttaacgttaccgcgctggtgccacccgcagtcagcctgtggttgcaggcgctgatcgaaggcgaaagccgggcgcagcttgcctcgctgaaactgttacaggtcggcggcgcacgtctttctgccacccttgcggcgcgtattcccgctgagattggctgtcagttgcagcaggtgtttggcatggcggaagggctggtgaactacacccgacttgatgatagcgcggagaaaattatccatacccagggttacccaatgtgtccggatgacgaagtatgggttgccgatgccgaaggaaatccactgccgcaaggggaagtcggacgcctgatgacgcgcgggccgtacaccttccgcggctattacaaaagtccacagcacaatgccagcgcctttgatgccaacggtttttactgttccggcgatctgatctctattgatccagagggttacatcaccgtgcaggggcgcgagaaagatcagattaaccgtggcggcgagaagatcgctgccgaagagatcgaaaacctgctgctgcgccacccggcggtgatctacgccgcactggtgagcatggaagatgagctgatgggcgaaaaaagctgcgcttatctggtggtaaaagagccgctgcgcgcggtgcaggtgcgtcgtttcctgcgtgaacagggtattgccgaatttaaattaccggatcgcgtggagtgtgtggattcacttccgctgacggcggtcgggaaagtcgataaaaaacaattacgtcagtggctggcgtcacgcgcatcagcctgaaggagagaacacgatggctattccaaaattacaggcttacgcactgccggagtctcacgatattccgcagaataaagttgactgggcctttgaaccgcaacgtgccgcgttgttaatccatgatatgcaggactattttgtcagcttctggggcgagaactgcccgatgatggagcaggtgatcgcgaatattgctgcgctgcgcgactactgcaaacagcacaatatcccggtttattacaccgcccagccgaaagagcagagcgatgaagatcgggcgctgttgaatgatatgtgggggccgggcctgacccgctcgccggaacagcaaaaggtggtggatcgcctgacgccagatgccgacgacacggtgctggtgaagtggcgctacagcgcgtttcatcgttctccgctggagcaaatgctgaaagagagtggacgtaaccagctgattattaccggggtatatgcccacattggctgtatgaccaccgcaaccgacgcatttatgcgcgatattaaaccgtttatggtggcggatgcgctggccgatttcagccgtgacgagcatttgatgtcgctgaaatatgtggccggacgttctggccgggtggtgatgactgaagaattactgccagcacctatccccgccagcaaagcggcgctgcgtgaggtgatcctgccgttgctggacgagtccgatgaaccgttcgatgacgacaacctgatcgactacggtctggattcggtgcgcatgatggcgctggcggcgcgctggcgcaaagtgcatggtgatatcgactttgtcatgctggcgaaaaacccgaccatcgacgcctggtggaagctactctcccgcgaggtgaaataatggatttcagcggtaaaaatgtctgggtaaccggcgcaggtaaaggtatcggctacgccacggcgctggcgtttgttgaggcgggagcgaaagttacaggttttgatcaagcgttcactcaggagcaatatccctttgcgaccgaagtgatggatgttgccgacgctgcgcaggtcgcgcaagtgtgtcagcgactgttagctgaaacggagcgactggacgcgctggtcaatgcggcgggaattttacgcatgggcgcgaccgatcagctcagtaaagaggactggcagcagacttttgcggttaacgtcggcggtgcgtttaacctgttccagcaaaccatgaaccagtttcgccgtcagcggggcggggcgattgtcactgtggcgtccgacgccgcgcacacgccgcgtattggcatgagtgcttatggcgcatcgaaagcggcgctgaaaagcctggcgttgagcgtcgggctggaactggcgggtagcggcgtgcgctgtaatgtggtttcgcctggctccaccgacaccgatatgcaacgcacgctgtgggtgagcgatgacgccgaagaacagcgtattcgcggctttggcgagcagtttaaactcggcattccgctggggaaaatcgcccgtccacaagagatcgccaacacgattttgttcctcgcctctgacctcgccagccatattaccctacaggatattgtggtcgatggcggctcaacgctgggggcataagcatgatctggaaacgccatttaacgctcgacgaactgaacgccaccagcgataacacaatggtggcgcatctgggaattgtgtatacccgtctgggcgatgatgtgctggaagccgaaatgccggttgatacccgtactcatcagccgttcggtttactacatggcggcgcgtcggcggcgctggcggaaacgctgggatcgatggccggatttatgatgacccgcgacggacagtgtgtggtaggcacagaacttaatgcaacacaccatcgcccggtgtctgagggaaaggtacgcggcgtctgccagccgctgcatcttggtcggcaaaatcagagctgggaaatcgtcgttttcgatgaacaggggcggcgttgctgcacttgtcggctgggtacggcagttttgggatgaacccgacagaattagatgagattgcaggaaaactcggttaacggagtgatcgagttaacattgttaagttaaatattggtttcaactccgatttacatggttgctgtgttgttaaattgtacaaagatgttatagaaacaaaatgtaacatctctatggacacgcacacggataacaactatgaacaaatcagggaaatacctcgtctggacagtgctctctgtaatgggagcatttgctctgggatacattgctttaaatcgtggggaacagatcaacgcgctgtggattgtggtggcgtcggtctgtatctatctgatcgcttaccgtttttatgggctgtatatcgccaaaaatgtgctggcggttgacccgacgcgtatgacgccagcggtgcgccataacgacgggctggactatgtgccgacggacaagaaagtgctgttcggtcaccattttgcggccattgccggagcaggtccgctggtggggccggtactggcggcgcaaatgggctacctgccggggatgatctggctgctcgctggggtggttctcgccggtgcggtgcaggatttcatggtgctgtttgtttctacgcgccgtgacggtcgctcgctgggtgagctggtcaaagaagagatggggccaaccgccggggtgattgcgctggtggcctgctttatgatcatggtcattatccttgcagtgctggcgatgatcgtggtgaaagccctgactcatagcccgtggggaacatataccgttgcgttcaccattccgctggcgctgtttatggggatctacctgcgctatctgcgtccggggcgtattggcgaagtgtcggtcatcggtctggtattcctgattttcgccattatctctggcggctgggtggcagaaagtccgacctgggcaccgtactttgactttaccggcgtgcagttgacctggatgctggtgggttacggttttgtggcggcggtgctgccggtgtggttactgctggccccgcgtgactacctctctaccttcctgaaaatcgggactatcgtcggtctggcggtaggcattttgattatgcgcccgacgctgaccatgcctgcgctgaccaaatttgtcgatggcactggcccggtatggaccggtaacctgttcccgttcctgtttatcaccatcgcctgtggcgcggtgtctggcttccatgcgctgatctcttctgggaccacgccgaagatgctggcgaacgaagggcaggcgtgctttatcggctacggtgggatgttaatggaatccttcgtggcgattatggcgctggtttccgcctgtatcatcgatccgggcgtgtattttgccatgaacagcccgatggcggtgctggctccggcagggacggcggatgtggtcgcttctgccgcgcaggtggtgagtagctggggctttagcattacaccagatacgctaaaccagattgccagcgaagtgggtgaacagtcgatcatttcccgtgcgggcggtgcgccgacgctggcggtggggatggcctacattctgcacggcgcgctgggcggcatgatggatgtggcgttctggtatcacttcgccattttgtttgaagcactgtttattctgacggcggtggatgcaggtacgcgtgctgcgcgctttatgttgcaggatctgctgggcgtggtgtctcctggcctgaagcggaccgattcactgcctgctaacctgctggcaacagcgctgtgcgtactggcgtggggctacttcctccatcagggcgtggtcgatccgctgggcggcattaacactctgtggccgctgtttggtattgccaaccagatgctggcagggatggcgctgatgctctgtgccgtggtgttgttcaagatgaaacgtcaacgttacgcctgggtggcgctggtaccaacggcctggctgctgatttgtaccctgaccgcaggctggcagaaagcgtttagcccggatgcgaaagtcggcttcctggccattgctaataagttccaggcaatgatcgacagcggcaatattccgtcgcagtatactgagtcacagctggcgcaactggtgttcaacaaccgtctggatgccgggttaaccatcttctttatggtggtcgtggtggttctggcactgttctcgattaagacggcacttgcggcattgaaagatccgaagccaacggcgaaagaaacgccgtatgaaccaatgccggaaaatgtcgaggagatcgtggcgcaggcaaaaggcgcacactaaagtcagagtgagggggggatgttggcgaatgttggcttagtgcccagggttccctctcaccctaaccctctccccggtggggcgaggggactgaccgagcgcgttgatagcatttgtaggccggataaggcgttcacgccgcatccggcactctttcagcaacatggttagcggaggccaagatgtttgattcactggcaaaagccggaaaatatttaggtcaggcggcgaagctgatgattggtatgcctgattacgacaactatgtcgaacatatgcgggttaaccatcccgatcaaacgccgatgacctacgaagagtttttccgtgagcggcaggacgcgcgctacggtggaaaaggcggcgcgcgctgctgctaaatttgtacgtcaggctttaaacgattccacttttttgaacgctgcacgcaacgtatctggtgtcagcgtgactggcaggtaatgaatggactccaccggacgcagggtgtgggcaatcactttgtcgatctccgcctgattattgatatccacttccagctccgccagtgtagtcggcagatgaaaacgctgatacgctccagttaattgcgccagcacatcatcctgacccagcaaggcgctttgcaccagaattccgtaggcgactttggtgccgtggagaaacttctcggtttgcggcagcacggtcagaccgttatgcacggcatgagctgccgccacacgcgtaaaacgatcgcccagaccaccaaccatcccaccaccagcaataatagcatccaccacatcgcaaaatgattgcgttaactgttgattttgctgatcgctcagcgcctgttcgctactgtttaacaagacgtcgcgaatggcttgcgcattattgatccccagtcgcacggttagcggcaacgtttctggttgcggagccagcaccaccgcttcataccatttcgccagcgtgtcaccgatccccgccagcagatattgttgcggtgcattgaggataatctccggttccaccagcaccataaaattggcgtcgtcgaaaatctcataatgcagcgcctgtccggcatcattataccagacggagagcggtgtccaggcggcgcaggtggcggcgatcgtcggaacggcaacaaacggcagaccgagacggcgggcgagggctttcgcggtgtcgagcagtgcaccgccaccgacgccaatcaccacgctgcggtcgtcaccggactcagccgccagttgttgtacatcgctttcgctgcaatgaccgcgaaacaaaatatgctttgcccctggcagtccaaacgctggcggaagtttggtttgcgccgcagcaatggcgcgtttgccgtagatccacaccgcgcgagaaagttgttcatcagtgaaaaaatcgtgcaggtgattgaaacttcctggatgtgaaaagtagttagccgggccgacgaccacgcggataggattgtgaggcatgttgtgttgtccttattgttttatttagacatctaaacgtcttgattgccaaatactagcatcgtgttatagtgccttcaacacgcaacttcgtcaggtacaataaaaatgacaaataaccctctgattccacaaagcaaacttccacaacttggcaccactattttcacccagatgagcgcgctggcgcagcaacaccaggcgattaacctgtcgcaaggctttcctgattttgatggtccgcgctatttacaggagcggctggcgcaccacgttgcacagggggcaaaccaatacgcgcccatgaccggcgtgcaggccttgcgcgaggcgattgctcagaaaacggaacgtttgtatggctatcaaccagatgccgatagcgatatcaccgtaacggcaggggcgacggaagcgttatacgcggcgattaccgcactggtgcgcaatggcgatgaagtgatttgttttgatcccagctatgacagttacgcccccgccatcgcgctttctgggggaatagtgaagcgtatggcactgcaaccaccgcattttcgcgttgactggcaggaatttgccgcattattaagcgagcgcaccagactggtgatcctcaacactccgcataaccccagtgcaactgtctggcagcaggctgatttcgccgctttgtggcaggcgatcgccgggcacgagatttttgtcattagcgatgaagtctacgagcacatcaacttttcacaacagggccatgccagtgtgctggcgcatccgcagctgcgtgagcgggcagtggcggtttcttcatttggcaagacctatcatatgaccggctggaaagtgggttattgtgttgcgccagcgcccatcagcgccgaaattcgcaaggtacatcagtatctgaccttttcggtgaataccccggcacagctggcgcttgctgatatgctacgtgcagaacctgagcattatcttgcgttaccggacttttatcgccagaagcgcgatattctggtgaatgctttaaatgaaagccggctggagattttaccgtgtgaaggtacatactttttgctggtggattacagcgcggtttctaccctggatgatgttgagttttgccagtggctgacgcaggagcacggcgtagcggcgattccgctgtcggtgttttgcgccgatcccttcccacataaactgattcgtctctgttttgccaagaaggaatcgacgttgctggcagcagctgaacgcctgcgccagctttagctatttaaccgtccaggcgcgggaatattgacggtcggcaaacaactcttgcaggccgttaatttgcttcaggcgcagcacttcgtcgctgtccattcccagctctttgccaattttattatcgtcccatcccaactggctaagttcacggacgatttccgacatggcggtgatttgatggcgtccacgagcgcgattatgacgaatagtcgcggcgatgcgttgattacgcgtaccttccagacaggtcaccggcaaataaccttttaagcgtaattttaatgatgatgagcctttaccaatttcatggcggtgaaaaccatccacgatttccatggcatttttatccgtatgtgtgaccacaatgggttgggtaaaaccatctatttcaatggatttttgcagcagttttttttcgggtggtgccacgttgtttgggttgtaatcattaggcataagttggctgtttttaacccacagaacgcaatccactggctcttcacgaaaggggctaacctgatggatcgccatgcggatttcattaatcgctttgatgcgatcatcttccggcaagctggcgagaaattgcgttaaatcctgcgttaatcgttgttgcatagtatcccccattcctgacgttttccttttatccgttcgttataacgctgatagttcttcgattttgtggggctaaatgataatgcccgacaccagtaatcgttattgagtaaaactttgcatatccgccgccaggaggggatatctttcgcgccaatgtccccttgctgggtttgtggaacctcgatgccttttttctgataccagtgcaaataaatggcgattttattgcggtaatgctcagctgttttttccggcatgctattgagcagcaataatgcatattcttgccagtctaaatgttctggcttgaggattttccgatgcccatagaaatgattgtcatgtccggcgtaaatgccgccactttttaccccgctgactcgtgcgcacatagcagcccagcgatccggttcgataacgtgatagagccataatccttgtcgttgctccgggccaaaaggttcgcaaattcgcatatgacgcagaggaacgcctgcctgatacattaggttatacagtgggttgcagagactttgatgatttgcataccaggtccagatatcagccactttccagtcgtaaatggggtaaatgtaccagctatgaccgcctggtgcggccgtagtccagggtttatcgtcggcaaaacgttgtttatttaaactggcgatggcgacaaaacggttgtaggactcatccgcacggatgccgatcatcatcgccgccggacgtttttgtgaaaaccattcggcaaactcacgtacaaattgttcgaaggtcatgcctggctggtaaaagcagaaaaagtcagggtcggttatcgcatcttggggaggttgacgtacccattcgacatcaggttcccagcactgccattcgggttggtattgtgaaagggaattttgcgtcgtaagcgggagcgcaacccagtaaaactcttcgatgacatcggtgtacaactcgcgcagggactgaacatagttaatggtgcaagagaattgcgcctcccagtcgataaacaaaacgcagatttttttgcccatttgtcgggcaagttcggctgtcagatgcagcattaaaccagagtctttgccgccagaaaatgagacacaaacgcggggtagggtgttgagtgtccaggtaatacgctctcgtgcagcttccagaatattgagcggaagaggaattttataaatagacatctgaagacgctctctgaacgttacagggtgatcagtgagataagtctgttaattataaagtaaacactgtaaagcagagtgttttatttttcattcgcgctgtgaataaatagatgaaagttatagtagctgtctgtagttatatatcaaaaactctcatttagacggtcaataaatcgggagaacaccaaattatttaaagaagatttattataggaaatgtaaagctttattgaaggtaacggatgttctagttttatctcttttaagttaagaaagtcacggtaggaattataaagttcataggggactattcccagtaaatctgtaactgcaatgctattaatgattgtcagcaaagaggaaccacgaaatgagattttgcgattcataaatctctcgtctatttccatttgaatatcatcaacccctgctgatttagatattaattgggtgaactcttctgccataatttgttcataagtgctattgtcagtaattcgtggatgcctattactacaaattagagtattgcgaatcgtatgcaatggcatgcaaatgacggaacggctgatcactggcatttgggtgatcaccagatcggctttgcggtgaaccaacagttcttcagcattctctgctgacatgaggatatcatggcactcaatctcgacagaggaatcttgccgtaggcagcggatcagcatactattattagagcaagaaatgagctgagggccgtagataataaagtttttctttagttcggacttattgactatattaattgtttgttcaaggcctctgagatttttctcaagatggtgatgcagatttaaccctgttgtcgtcggcgcgataccttttcctgagcgaatgaataaagggtcattaaattgcgcacgtaagcgttgtaacgactggctcacggctgatggggtgatatatagtgattcagcagctttgctaatgcttaaatgctggtaaatacactcaaatatgacaagaagatttaagtcgaactttttcaagtcgtagagattggccatacactactccggttatatttttcttccatgatatattcacttaatcaatgttttttgcgtatatatttttattgattatgtttttttgcttaactcaggattaagtttttctaaaatagcacagccacttagggcagagcgagcaattcatgcttttttaggatggttgaaaagcagggatatagttcaaccatccatgaattaccttttatttattccccataatgatattaagcgttttctgatcgggcaaccccacggcctgttgtagcgtattttccttactcatgtaatagatagccggcgtgacatttgcccccagatcgtccatcagtttctcattgtcacttaacactttcatttgctctgtacttacgtttgcaggcacgtttagcttaagcttgccaccagaggcttcatattgttgccaggtttttgcgggatctttggaggcaagaattgccgctgctgtcgccgggctttctggcttgataaccccaaccaacaatgttcttaattgcactttgccagaatctacccacgggcgcgcctgctgccagaactgtttacaatatgggcagaacggatcggcgaagacgtagacaatgaccggcgcatcttttttaccgtcgaggagccagtgggattgttccatccgttgccacatttcgcgtccggctggtgcgtaaatttctttttcgataagtgtgttactcaggttttcacctttctcgttgtacatgtaaccagagatagcgtgcttaccatctggagtcaggtagatggtgacgcccatatcctgatactttccgagataacctttcattcctccgggggcatcgaatgttttgatgattgtaatgccctgtttttcaatcgcttttactggagcaggaagttcctctgcgaaggcgattgcaggaagcagagccagtaaaagtatcttttttaacattaatttgtccttttcagtcagtgcaaaagtcgagtaaaaggcataacctatcactgtcataggtaagagcttagatcaggtgattgccctttgtttatgagggtgttgtaatccatgtcgttgttgcatttgtaagggcaacacctcagcctgcaggcaggcactgaagataccaaagggtagttcagattacacggtcacctggaaagggggccattttactttttatcgccgctggcggtgcaaagttcacaaagttgtcttacgaaggttgtaaggtaaaacttatcgatttgataatggaaacgcattagccgaatcggcaaaaattggttaccttacatctcatcgaaaacacggaggaagtatagatgtccttgattaacaccaaaattaaaccttttaaaaaccaggcattcaaaaacggcgaattcatcgaaatcaccgaaaaagataccgaaggccgctggagcgtcttcttcttctacccggctgactttactttcgtatgcccgaccgaactgggtgacgttgctgaccactacgaagaactgcagaaactgggcgtagacgtatacgcagtatctaccgatactcacttcacccacaaagcatggcacagcagctctgaaaccatcgctaaaatcaaatatgcgatgatcggcgacccgactggcgccctgacccgtaacttcgacaacatgcgtgaagatgaaggtctggctgaccgtgcgaccttcgttgttgacccgcagggtatcatccaggcaatcgaagttaccgctgaaggcattggccgtgacgcgtctgacctgctgcgtaaaatcaaagcagcacagtacgtagcttctcacccaggtgaagtttgcccggctaaatggaaagaaggtgaagcaactctggctccgtctctggacctggttggtaaaatctaaatttccttcgtctttcacgccatagcggcgttggcgtcgcccgctcaccccggtcacttacttgtgtaagctcccggggattcacaggctagccgccttgctctgacgcgaaatacttcggaaattcacctaattcttcgggtgctgcggcacccgattttcttccccgcaccatgatgcaagctgcatccaggtagccgcagaggccgcttgcatgatgatgtttaaagcccaggagataaacatgctcgacacaaatatgaaaactcaactcaaggcttaccttgagaaattgaccaagcctgttgagttaattgccacgctggatgacagcgctaaatcggcagaaatcaaggaactgttggctgaaatcgcagaactgtcagacaaagtcacctttaaagaagataacagcttgccggtgcgtaagccgtctttcctgatcaccaacccaggttccaaccaggggccacgttttgcaggctccccgctgggccacgagttcacctcgctggtactggcgttgctgtggaccggtggtcatccgtcgaaagaagcgcagtctctgctggagcagattcgccatattgacggtgattttgaattcgaaacctattactcgctctcttgccacaactgcccggacgtggtgcaggcgctgaacctgatgagcgtactgaacccgcgcatcaagcacactgcaattgacggcggcaccttccagaacgaaatcaccgatcgcaacgtgatgggcgttccggcagtgttcgtaaacgggaaagagtttggtcagggccgcatgacgttgactgaaatcgttgccaaaattgatactggcgcggaaaaacgtgcggcagaagagctgaacaagcgtgatgcttatgacgtattaatcgtcggttccggcccggcgggtgcagcggcagcaatttactccgcacgtaaaggcatccgtaccggtctgatgggcgaacgttttggtggtcagatcctcgataccgttgatatcgaaaactacatttctgtaccgaagactgaagggcagaagctggcaggcgcactgaaagttcacgttgatgaatacgacgttgatgtgatcgacagccagagcgccagcaaactgatcccagcagcagttgaaggtggtctgcatcagattgaaacagcttctggcgcggtactgaaagcacgcagcattatcgtggcgaccggtgcaaaatggcgcaacatgaacgttccgggcgaagatcagtatcgcaccaaaggcgtgacctactgcccgcactgcgacggcccgctgtttaaaggtaaacgcgtagcggttatcggcggcggtaactccggcgtggaagcggcaattgacctggcgggtatcgttgagcacgtaacgctgctggaatttgcgccagaaatgaaagccgaccaggttctgcaggacaaactgcgcagcctgaaaaacgtcgacattattctgaatgcgcaaaccacggaagtgaaaggcgacggcagcaaagtcgttggtctggaatatcgagatcgtgtcagcggcgatattcacaacatcgaactggccggtattttcgtccagattggtctgctgccgaacaccaactggctcgaaggcgcagtcgaacgtaaccgcatgggcgagattatcattgatgcgaaatgcgaaaccaacgtgaaaggcgtgttcgcagcgggtgactgtacgacggttccgtacaagcagatcatcatcgccactggcgaaggtgccaaagcctctctgagtgcttttgactacctgattcgcaccaaaactgcataagaagaagtaagattcacctgcaattgcttagccgccggggtcaaacctggcggcttttttatggcattaaaaagccccgccgggatggctccgggcagggcgggatacttattctggcaattaacgcacaaccagcaccggcagattggcgtggcggatcacgctcgaggcgttagaacctaacagatgggtcgaaatcgatgggttgcgagaaccaataactacaacatcagcccccagttcttctgccaactcattgacttcatcccgcacgctaccaaaacggacatgttgtttaatgcgggaaggatcgatggtgaagtggctgaccatcgtttgcagacgttcttgtgcttcatgttgcagatgctcttcaaaacgacgcacatcagcggcaaaacggtgcaggctcaggctggctgacccgggtagtacgtgaagtagatgaataactccgtcatcctgggcgaggaattcagcgtggcgaacagctttgtcgctcaattccatttcaaatacatcaactggcataatgattgtcttatacataaccctttctccctgttaatcatgaacaaatcattcgccatgattataatatttatccctgatatttgtctggttctttttccttacgaactgtttctgtgatgaatatattctcactgaacaccaggaattctcccaaaacctgtggtaccgcccgttttcccgctgtgatagctacccttaaagactgactcttttttgaactgtctctggaggttgcatgaaagcattgacttatcacggcccacatcacgttcaggtagaaaatgttcccgatccgggcgttgaacaggcagatgatattattctgcgtattacggcaacggcgatctgtggctctgacctccatctttatcgaggcaaaatacctcaggttaaacatggcgatatttttggtcatgaatttatgggggaagtagttgaaaccggaaaggacgtaaaaaatttgcaaaaaggcgaccgagtggtaattccgttcgtcattgcttgtggcgactgttttttctgtcgattgcaacaatatgccgcctgcgaaaataccaatgcgggtaaaggcgctgcgctcaataaaaaacagataccagctccagcggcattgtttggttatagtcacctgtatggcggcgttcctggtgggcaggcggaatatgtccgcgtccctaaagggaatgtggggccgtttaaagtaccgcctttgctttcagatgataaagcgcttttcctttctgatattctgccaacggcatggcaggcagcaaaaaatgcgcagatccaacaaggttcaagcgttgcagtctatggtgctggtcctgtgggattgttgacaatcgcctgtgcacggttgctcggtgcggaacagatttttgttgttgatcatcatccctaccgcttgcatttcgccgccgaccgctacggcgcgatcccgattaattttgatgaagacagcgatccggcacagtcaattattgaacaaacggcaggtcaccggggcgtggatgcagtaatagacgccgtcggttttgaagcgaaaggcagcaccacggaaacggtgctgactaacctgaaactggagggcagcagcggtaaagcgttgcgtcagtgtattgcggcggtcaggcgtggcggcattgttagcgtaccgggcgtctacgctggatttattcacggtttcctgtttggcgacgcctttgataaagggttgtcgtttaaaatgggacagacccacgttcacgcatggctgggagaattattaccgttaattgagaaaggattactgaaaccagaagaaattgttacccactatatgccgtttgaagaggccgcccggggatatgagattttcgaaaaacgtgaagaggagtgccgtaaggtgattctggtacccggtgcacaaagcgcagaggcggcgcagaaggcggtttcaggtctggtgaatgcgatgccggggggaacaatatgatcgtcaggagtggttttcgaggtaaaggacagccatgacgataatcgccgccataatcagaaatcctatcaggatgtaaaatgcttctgccatggttattcccacaaacgaaacggaataattttgcagcaaaagtgaacagtgagaaccaggaaaaattgctgattttgcgtaaagaggatgcgagtgcatcctctgggcaaagcgagttatcgcttgtgcagatgggattaaagcaggtagtcgccagcagcttctggctggtattcgagttccagcacttcaaggtgggttgcaacgccgcccggaagttcccagtgaatggaatcgccaacgcgcagccccagcagtgcggcacctaccggagccataacggaaagctgagtattgctatcggtcatttttgccggatacaccagcgtgcgcacacgcacttcgccatcgctaagattgcggaatttaacccggctgttcattgtcaccacgtcgtgtggcatctcttctggcgaacacatttgggcgcgatccaactctgcgtttaacgcgtcggcgattggcaaaccagcataggcgggttgctccagcagaatatcgatgcgttcggcatccaggtcgttaatgatgatagttggtctggacatttttactccatgtcgtcggtgctgcgagtgtcgcagataaacatacccaaaagaaaaccctcaccgtcaggcggcgagggtttaactcacatgatgatactgactgttgctcactctttgaagtgatttgcgtcacattcagggaattcctcaatgcagcgcattatgtataaatcttaatcgccttggtttatggaagacgaattagcgtgttttgtaaatcagatgattaataacccgctttatcaatcacaaaggttttgccacagttacctgggtgaggttgtggcaagaatgagtttgcagaaagcggagcgttgatggcgtcagctttgatcgagatctgaatttcagtcaaatacgcagggttaccctggcacgttagcttaactgctttcacgttctcttttccccagcttttggcaaaggcggcgtcaaagtcacggcggctcactgttttaccgtaattatccgcaaggaattttccggcttcgctctctttaatttcttgattcaggcgtaccatcgtaccgaagtatgcgtccggatcaaaaccaaagcaggcaccgtgtttggcatattcgtagcgttccaggcaggaacgtccgccagctcctggcatgacttcacttagtttagcggccgtttccagtgataatccggtttccggcgatgaacacattcggctggcgcgcgcttctggtagattcgggattgggcgagtagcgcaaccgaagcgcatccagcggcgttcatcaacaccacgggcagcaaccgatttaggcaatcctggccacagaccatgtacggtcagaaaatcagctttgttggtcgtttcggtttgcaggcgacattcatctcgttcgttacgatttcgatcgtgttgactctggcaaaatccggtttgccaggagagggccaggacatagcgatcaaaatcgccatactgttttgcctgcaacgctaaggcgttggcagaagagaagggaagcagagaaaccgcgagcaacgcggcgttacgccagaatgctttcataatgggtgtggaactcatacatacactgaatactatctattaaatcataaaaaagcccgccaggtgggcttacctggcgggcgtgatgatttattcagcgtttggcgaacgtattagttccacatggcgagaatcggccagccaaccaacagcaacatagagatgtaaatcaccccgaagattgcgccaagacgccagtaatcttttgatttcacatagccacagccgtaaataatcaccccaggaccggttgcatacggcgtcagacagcccatgataccgatagacagcaccagcaggatacacagttgttccattggtacgcccggaatacctttaccgacggccagaataaccggcagcatggttgcggtgtgcgcagacaggctggcaaacaggtagtgtgcaaagtagaacaccagaaccagtacaatcaccgttgcgtttggtgagaatccttccaggtgcgtactcatggtaccggcgaaccagtcaataaaaccagaacgagtcaggccgttagccatcacaaccagagttgccaggttgaccagtgtgttccatgcgctgttatagcgggtaatgtctttccaaggcacaacgtgcagggccagcattagcgaaactgccagcagaccaaccgcagtagcattaatgacttcactgccaaatacccacaaacctaagctgagcaatacaaggccaatcagtgtccactctctgcgtgtcagcgcacccatggttttcagttcatcacccgcccaggttgccacttcttcactgtgtgtgatttccggtttgtacagcacgtaggaaagccacggcgcaatgataagcaagataaccccaaccggcaggaagcagaggaaccactgcaaccagctaatctggataccggcaattttgctgacgaactccagacccagcacgtttggtgccgcaccggtgacaaacatggacgaactcagactggtactaatgaccatcatccacatcaaatagccgccaatacgacgcgcggacggatcgttcgggaatgatttaaacaacggcggcaggtttttaatgaccggaaaaaccgtacccccggtacgcgcggtgttggaaggtgtaaacggtgccagcagaatgtcgataatgacaatcgcataacccaacgtcagcgtgcgtttgcccatgaatttcaccaggaaaagggcaatgcgacgacctaacccggaaacttcataccctaatgcaaaaataaatgcgccaaataccagccataccgtggtgctggaaaaaccagccaggccccatttcagcgcctgtttttgcgcattaaacgctgggtcagctaattctttggcatcaaagagcaggtaattactgccaataacgcaaatagtaaccgcaataaaactgatcgctgttgccggaattggctcgaggatcatgccgacaatcattgccacaaacacagcgaagtaatgccatgcctgcggcggcataccgtcggggacagggataagaaacatgacacccatcaccaccagtggggccaatagtttccatatattatcttttgctaaagacatacgggttctccgaaaattaatatttccaaatttatcaagtgcttaaataattaaatctgtgctaaaaaccaggtaaggatcagtaggtcagcactgccgcctggactgagatttcgttcgatacactccctgtcgaactgccggagataatcgagatcggcgggggttcgaatgccccctttttgcaataatgtttgcgcctcgcgctgtagccagcgcaggcccccctcgccaccgcgcgatgcaacgttggtatcgccgttgatcgccatcagtaggagcaaggtatcgagcaatgccagttcaggatctaacccctgatccagcagagtgaggtaatgcggcaaggcgtgattgatcaccagtggataacccgcttcggcttcaccgcgtgcgccggtaaggccaagctgttggtacaaccgttgacctgccgtcagttgtgaattattggtacgcagttcgcgatcggtcaggccacggcagaaacttgccgccgtagaacaaacggttgttggcgttaccggttggttgagttgaagcaaacggccaattgccgcacatagcagccctaaagaaaaaatgctgcctttatgcgtgtttacgcccgcagtggcgcggaacatatcaccttcgcaagccataccaattgggcgtaatccgtggagtaccgcttctggtgccatttccgcactacaggcaccaaattcaatgaaacggggtagccagccctgaatcgccagcgcgctgcggtggaaatcttccagcgccatatctttgtgcgcaccgcagttaatgcgatccacgaggcctggtttcggtgacagattgacttcagtcagcatggcgcgccagcccagcagggcgtactcatcgattaatgacgtcgcaagctttgtggttttagttgacgttgcaggcatcgacatcgttcagcagtgcctccatgcggttgagtaaatcggtcagttgatgggtttttccacgcgcgcagacggctgcgctttgttcgcacaacaggcagcggcgaggcggcagtgaatagtcgcggcgggagagaatttcgccttcgggcgtcaggacatcgatatcccataaccgcccgagaggatgactatgttcaagctcaatggtggcgagcttgaggtcgcgagccggggcggcaatgctcaacatgccctccggcccgctggcggaaaccagtgcagcctgctcctgaatttgccagccctgttttgcggctaaggcacgcaaggctgtcacgccatgattaaaaattcggcgtgtgacctcgctgtctttaatcggcccaggcgcaaccacggtaaaggagaccagtggaacaggatggcgcttgagccagacgtgttgccgtgcttgcctttcatcccggctgacgagcagctcgggaattgataccgcatggtggctggcgagttcaggaagcaggtgcatggcttattccttcacctgatgcacaacatcgatcaccgagccatcgcggtaacgcacaacggcaacgacgcggtctgtgaattcaatcggctgtggttcaccggtcagcagacgcgcacgttcgcgcagccactcaatggaaaccactttaatgcccgcttcctgcagacgttctgccagttccggacgtgccgggttaactgcgataccgtggtctgtgaccagaatatcgacactggagcctggggtgatgcaggtcagtacgttatccaccagagtcggaatacgaccgcgtaccagcggcgcgacgatgatggaaagcgcagaggcaatcgcggtatcgcagtgaccaccggaagcaccacgcagtacgccgtcagagccggtcagcacgttaacgttgaactgggtgtcaatttccagcgcgctcagtaccaccacgtcgagacgatcaaccgatgcgcctttcgaaccccagttagcgtactggttggcgctgatttcgatgtgattggggttacgggccagcgattgcgcagcatggctgtcaaagctctgcacatccagcagtttgcggatcagacctttttcgtgcaggtcaaccatcgtcgcggtaataccgccaagggcgaagtcggcgcgaatatcgcggctacgcattttgtcttccaggaaacgggttaccgccagcgatgcgccgccggtgccggtttgcatggagaaaccttctttgaagtagccagagttgacaatcacatccgcagcgctacgggcaataagcagttcgcgcgggttagtggtcatacgggtcgcgccagcgccgatttttgcagcatcgccaacgcggtcaactttgacgatcaaatcaacctgatcttgctcaatgcttgccggattatgcggataaggcagcagttcttcggtaagcatcacgacctgttttgcgttgtcggcatcaactattgcatagccgagggagccgcagcaggctttaccggtgtagccgttggcattaccgaattcatcacaggacgggacgccgaggaaagccacgtcgatattcagttcgccgctctgtaccagatgcacacgaccgccgtgagagtggatctgcaccggttctgccagcagaccacgggagatctcttccgccagtggaccacgcaggccggaggtataaatgcgggtaaccacgccctggcgaatgtgttctaccagcggcgcatggcaatcactcagggagctggacgccagggtcaggtttttaaagcccatcttcgcgatgacgtccatcaccatattgacggtcaggtcaccgccacggaaagcgtgatggaaggaaaccgtcatgccgtcctgtaaaccagagcgacgaatcgcttcttccaggttggcgcacagtttgcgatcgcgcgctttttcagcctggtaggtttgctttggcgagttctggaaagcggcaagatcgcattcagcgcgacgattccaggccgctacccgttcttgtcgttgagattgttcaattttctgcgtcattttgattgccttattcttcgcggatgccggaaagttctgcacgggagagcaccagacgggcgcgatcgataaccggaccgtccaccatcttgccgttcagggaaaccacgccgaggccttcgcgagcggcggcttcagcggcttctacgacgcggcgggcgtgatccacttctttctgggtcggtgcgtagaggttgtgcagcagatcaatctgacgcgggttgatcagcgatttgccgtcaaagcccagctgtttgatgtgggcggcttcttgcagaaatccggcttcgttgttagcgtcggaatagacggtatcgaacgcctgaatacccgcagagcgcgcggcctgcaaaatggaacagcgtgcgaacagcagttcagttccttccggggagcgttctgtacgcaggttgcgcacatagtcttctgcaccgagggcgataccgatcaaacgctcggaagcgtgagcgatttccactgcgcgggtaatccccagcggagattcaatcgccgccagcaggccggtgctgccgggttcacgaccacaggctttttcgatacgcaggatctctttttcaatatccagaacatcctgagcggtatcggttttcggcagacgcacaacgtccgcaccaccgcgaacgacggcttccaggtcgttaacaccccattcggaatccagcgcgttgacacgcacaatggtttcaatatcgcgatacagcggatgttgcagcgcgtggtaaaccatgcggcgggcggtgtctttttcacgcaatgctacggagtcttcgaggtcaaacatcagggcatcagccgggtagatgaaggagttgctgaccatcgcggcattggcaccaggcacaaacaacatgctgcggcgggtgcgagttttacgttgttgcagcgaagcggaaatcattggcaatcctcccatggcagagccgggataccgctggcgcgtgccagcagggcttccagtcgtgcacgtaaaatgcagtccagtgcgcctttgtcatcgacattcagctgtacgccgcgcacgttgtagcgggcgagaacgtccagaatggtggtgcgaattgcatcgccaaactgtttctcaacgctgctattgatttgcaggtcgatatcctgcgtatcgagtggggcgatgcgtatcatcacatccccagactcaagggtgcctgcaacggcgggctggtttattttcatttttcacctgtttctcatgcgggggtcttttgacgagctgccgcgtcctggcgggagtgctcaagcaggttctgcaaataatgcagcgtgactgcagggaccagcggcgcgatagccgtgagatcgtttttcgccagcagttgacgtacccgggaagcggatatcggcatctcctggtaacgcagccgctcaatttcaaccagttcgatgggcggtgcggagatagtcggcgtttccagccagtagcgcatatcctggttgtactgggcggtaacgcgacaaaagggttcagtaccgacaaagcggtgagttacacccagcgcgggagcgaggtactgacggaaaatcttcagatcaatttcggtgtaacaatggttaatgacgctctgttctttaatgaagtagcaagggaacgtagcgcgggagatgatgtattcggagccacgatgcacagtcaggcgtggaatatcggcggtgccttttaacaccaaatccagccggtcttcataggggaagcgtgaagaatcttctttgactaaaaacagatgcaaccagtcgcactgtgccgcagcctgttgaatcagataacggtgaccattcgtaaagggattggcgttcatcacaatgcagccaatcttgttccctggatgacgaaattttttcagcgattcggcatagcgtttcagtcgcgtggcgctgttttccatcagcaccatcacgccgggtacgctggtcagcgtggaaaaaccgcactggcggaacagcgcctcgtattcggttttggtataaataaacagatgcgtgctgtgccgctcataggcgaggtttatcaattcagtggctaatgtcagcgccagtccttcaccgcggacggattcactgatagcaacgcatttaataatatttccggcaattccaccgcacgcgataagcttttcatcgcgggttacggtaataaatacttcgactgtggtgtcaacgctcaaatcattttcatgcaggaattgggcgatttccgccatttttttattttctgaacgttttacgcgggtgaaaatatcattgccgaacataataaatagtatcctgaaggtgcatgttgttatcgatttgcaacgaatgttgttcaatgttgcaaactgataaccttttattttcacttgggagaaagggggtgatcgaggtatatctttttctcctttcgctatacatcctaaggagtatttcggcgtgaaattttgatttatttcacatagagttagtggttttttatttatttaatgattttaagttttttaattaatgtaattacgaaatgactcgcaggtttaagtgatttaattgatttaatgaataaaatttgccacgatcataattaatatctatgtattttgattcaacattttaattacatccgtcaaagaggctcgggacaacccgcaaggaaaacaatgttgcagcttaacgagaataaacagtttgcatttttccaaagactggcatttccgctgcgtatctttttgctgattctggtgttctcaatatttgtcattgcagccctggcgcaatattttacggccagttttgaggactatttaacgcttcatgtacgcgacatggcaatgaatcaggcgaaaattattgcctccaatgacagtgtcatctctgcggtgaaaacgcgtgactacaaacggctggcgaccatcgctaacaaattacaaagagataccgattttgattatgtggtgattggggaccggcactcgatccgcctttaccatcctaatccggagaaaattggttatcctatgcagttcaccaaacagggcgcgctggagaaaggggagagctacttcattaccgggaaagggtcaatggggatggcgatgcgcgccaaaacgccaatctttgatgacgatggaaaagtcatcggcgtggtgtcgattggctacctggtgagtaaaatcgatagctggcgggctgagtttttattaccgatggcaggtgtgtttgtcgtgctgttagggattctgatgttgctgtcgtggttcctggccgcgcatatccgtcggcagatgatgggcatggagccaaagcaaatcgcacgcgtggtccgtcagcaagaggcgctgtttagttcggtttatgaagggctgattgcggtggatccgcatggttacattaccgccatcaatcgtaacgcaagaaagatgctggggctgagttcccccggacggcaatggttgggtaaacccattgttgaagtggtcaggcccgccgatttctttaccgaacagattgatgaaaaacgtcaggatgtggtggcgaactttaacggtctgagcgttattgccaaccgggaagctattcgttcaggtgatgatttgctgggggccattatcagctttcgtagtaaagacgaaatttccaccctcaatgcgcaactgacgcaaataaaacaatacgttgagagccttcgtacattgcgacacgagcatctcaattggatgtcgacgctcaatggtctgttgcagatgaaagagtatgatcgcgtgctggcgatggtgcagggggagtctcaggcccagcaacagcttattgacagcctgcgcgaggcgtttgccgatcgccaggtggcggggctgctttttggtaaagtgcagcgcgcccgggaactggggctaaaaatgatcattgtccccggtagccagctttcgcaactgccgccaggactggatagcaccgagtttgcagccattgtgggcaatttacttgataacgccttcgaagccagcctgcgtagcgatgaaggaaacaagatcgttgaattattcctcagcgatgaaggcgatgatgtggtgattgaagtcgccgatcagggctgcggcgttccagagtctctacgagacaaaatatttgagcagggggtcagtacgcgtgctgacgagcccggtgaacatggcattgggttgtacttgattgccagctacgtaacgcgctgcggtggtgttatcactctcgaagataatgatccctgcggtaccttattttcaatctatattccgaaagtgaaacctaatgacagctccattaaccctattgatcgttgaggacgaaacgccgctggcagagatgcatgcggaatatattcgtcacattcccggattcagtcagatattactggcgggaaatctggcgcaggcccgaatgatgatcgagcgttttaagccggggctaatcttgctcgataactatcttcctgacggtagagggattaatttactgcatgaactggtgcaggcgcattatcccggcgacgtggtgtttaccactgcagccagcgatatggaaacggtgtctgaagccgtacgttgtggtgtatttgattatctcattaagcccattgcctatgaacggctggggcaaacgctaacccgtttccgccagcgtaaacatatgctggaaagtattgatagcgccagccagaagcaaattgatgagatgtttaatgcttatgctcgcggtgaacctaaggacgagctaccgaccggcattgaccccttgacgctaaacgcggtgcgaaaactgtttaaagagcctggtgtgcaacatacggcagaaacggtggcgcaggcactgaccatcagccgcaccactgccaggcgttatcttgaatattgcgccagccgccatctgattattgctgaaattgttcacggcaaagttggcagaccacaacgcatataccacagtgggtgacatgataaagccggaggaaacttgcctccggcattactatttacttgcctgtgaccgctgctgccgttcctggcaccatcagctctgtagcaacgataacaatcaccaaaccaacaagcaccggtaccgaggtgcgttttacgacttcaaacggcgagatcttcgccatcccggcaaccgcaacgactacgccagaaacgggcgaaagggtacggccaaggtttgacgcctgcagcatcgggatagtcaaatacgccgggttaatgccggaagagtgcgccagtttcgggatcatctcaacaaacgcataaaacggcgcattgcctgaaccggtcgtgactgccgccagcattgtcagaatcaccaataccagcatcaggatgatactcgccgaaccaaacgaggtagcgatagaaatcagactttgaataaagccgatggtgctaaggaaggtgcgaacaagtccctgatatgagatcatgtttgtcatctggagccatagaacagggttcatcatgagtcatcaacttaccttcgccgacagtgaattcagcagtaagcgccgtcagaccagaaaagagattttcttgtcccgcatggagcagattctgccatggcaaaacatggtggaagtcatcgagccgttttaccccaaggctggtaatggccggcgaccttatccgctggaaaccatgctacgcattcactgcatgcagcattggtacaacctgagcgatggcgcgatggaagatgctctgtacgaaatcgcctccatgcgtctgtttgcccggttatccctggatagcgccttgccggaccgcaccaccatcatgaatttccgccacctgctggagcagcatcaactggcccgccaattgttcaagaccatcaatcgctggctggccgaagcaggcgtcatgatgactcaaggcaccttggtcgatgccaccatcattgaggcacccagctcgaccaagaacaaagagcagcaacgcgatccggagatgcatcagaccaagaaaggcaatcagtggcactttggcatgaaggcccacattggtgtcgatgccaagagtggcctgacccacagcctggtcaccaccgcggccaacgagcatgacctcaatcagctgggtaatctgctgcatggagaggagcaatttgtctcagccgatgccggctaccaaggggcgccacagcgcgaggagctggccgaggtggatgtggactggctgatcgccgagcgccccggcaaggtaagaaccttgaaacagcatccacgcaagaacaaaacggccatcaacatcgaatacatgaaagccagcatccgggccagggtggagcacccatttcgcatcatcaagcgacagttcggcttcgtgaaagccagatacaaggggttgctgaaaaacgataaccaactggcgatgttattcacgctggccaacctgtttcgggcggaccaaatgatacgtcagtgggagagatctcactaaaaactggggataacgccttaaatggcgaagaaacggtctaaataggctgattcaaggcatttacgggagaaaaaatcggctcaaacatgaagaaatgaaatgactgagtcagccgagaagaatttccccgcttattcgcaccttccctaagcccctgagcgaataccccagcggcaaccagcagcatcaccacgttagcaaacgcatctgccatcccgcgataagccacttccagaccagagaaaactttctgggtattaaagctgcggaggaactccagaatggaggcaatcagcatacaaatcaccagaatagtgatgatgtgtaattgcggaccccatttaccgtcaaaaatcagtacaccgatgatcggcgtgaacggcaaaatggcataaaacgcaggagcagtggtggtgatttcactgacatctaacatttcatgagagatgtgctcttttttatccagataacgttgccagaagaagtgggcgatcgccatgccgataattgcagcaattgagataggcagcgtcgttttgaaggcgaagtcaatcagcgacatttcggaagcttgcgccgccagcaccacatcccctgaagtcggtgcgagaataatcgccgccggggaggcacaaatggcagcagctgcgccacgactgataccaacgtttaccatcaccggaaatagggttgccatcagcaaaacacccagaccggttgcggaagagacggccagagacatcagacaggcgacaaaataggcggcaatcatcagcaggtaaggggagttaatatactgcaatggttttgacgccagcttgaccaccatatcattcgcgccgatatgggtcatgtaagcggcaaatccacacagcatcataatcatcatgccgaggtcgccgccgcggctcattagtaatattttaacgtattcaacgatatccgtggcgctgtagcctgttgaagcctggctggacggtaacactttgtgccccataatggcactgataatcagcaataacaggccaccgacaaataacacaccagtggcggaataccctttaatgatgtagcgagctacacccacaataaccacaaccccaataaggagctcaatgaatgtcagcataatttttcctgtctccaggccccaaagtaaataataaaaaattcctaaagcttaaggaaaaaatatgcccaataaattggcgatgaatgctgattaaaatcaagaaaaactgccattaagacattgaagttgctgtttttatacatagataacaaaacgcatatttagcggttggcaattatcacataataatgtgtgcaaattgatggtggattgatgcaaatttgttaattgcaatggtgttagctgcggctgtgcgctcaaaaaataatctaatatgagcataggttgacgatatatattatatacttcgttaagatgattgttgtatctcgttaaaaaataaaataatttttccttgattgcattttgtcatcaaaaaagacttggtttttcttttttgactattcccatcgcagaaaacgacgcatcatctttaatcgatgcgcggaaatatttaacttgaacaagcggaaataaatagagcagctattcagattattctttatgttgggtctattaaggttatgttaattgtagctttgctatgctagtagtagatttttgataaatgttttatggtcacaaatgaacgtgagtaaatatgtcgctatcttttcctttgtttttattcagttaatcagcgttggtaaagtttttgctaacgcagatgagtggatgacaacgtttagagaaaatattgcacaaacctggcaacagcctgaacattatgatttatatattcctgccatcacctggcatgcacgtttcgcttacgacaaagaaaaaaccgatcgctataacgagcgaccgtggggtggcggttttggcctgtcgcgttgggatgaaaaaggaaactggcatggcctgtatgccatggcatttaaggactcgtggaacaaatgggaaccgattgccggatacggatgggaaagtacctggcgaccgctggcggatgaaaattttcatttaggtctgggattcaccgctggcgtaacggcacgcgataactggaattacatccctctcccggttctactgccattggcctccgtgggttatggcccagtgacttttcagatgacctacattccgggtacctacaacaatggcaatgtgtactttgcctggatgcgctttcagttttgagacaaatgaagttttagtaacttctttaaaatcaatagctaaaataagtaacatcaaaaataacgcgacttttatcactttttagtaaagttacactggacaaagcgtaccacaattggtgtactggtaaccgacacagcatttgtgtctatttttcatgtaaaggtaattttgatgtctaagattaaaggtaacgttaagtggtttaatgagtccaaaggattcggtttcattactccggaagacggcagcaaagacgtgttcgtacacttctctgcaatccagactaatggttttaaaactcttgctgaaggtcagcgcgtagagttcgaaatcactaacggtgccaaaggcccttctgctgcaaacgtaatcgctctgtaagatacgtcagcaagaattcaaaacccgcttaatcagcgggttttttttggtctttagtgtgcggttgaggccgaaaacagccagaatgccagtgcggtcatggcaaaagaccccagaaggttgacgaaaacgttcagtaatgcccagccaaagcggccctcttgtaacaaaaacaccacttctgccgaaaatgttgagaaggttgttagaccgccacaaaatccggtggtgattaatactttccacactggatcaatgttcgtcatcctgctgaaccatgcgaatcctattcctatgatgaatgccccaatcaggtttgctgtcagcgtccccaacggaatcgcctgatgcagtgggttaaatcgcatacttaacagccatctcgccacgcttcccgtaccaccgccaataaaaactgctaaaagaagttgtaacactgcaaaatcctgctatttgatttgtatgagtgataagtgtaacgccgaataatcgtcgttggcgaattttacgactctgacaggaggtggcaatgctggttgccgcaggacagtttgctgttacatctgtgtgggaaaagaacgctgagatttgtgcctcgttgatggcgcaggcggcggaaaacgacgcatcgctgtttgccctgccggaagcattgctggcgcgcgatgatcatgatgcagatctatcggttaaatcagcacagctgctggaaggcgaattcctcggactttacggcgagaaagtaaacgtaacatgatgacgacaattctgacgattcatgttccttcaacgccggggcgcgcatggaatatgctggtggcacttcaggcaggaaacatcgtcgcccgttatgccaaactgcatctctatgatgcatttgccattcaggaatcacgccgtgttgatgctggtaatgaaatcgctccgttactggaggtggaagggatgaaggtcggtctgatgacctgttatgacttacgctttccagagctggcgctggcacaggcattacagggagctgaaatcctggtacttcctgccgcctgggttcgcgggccgctcaaagagcatcactggtcaacgttgcttgccgctcgtgcgctggataccacctgttatatggtggcggcgggggagtgcgggaacaaaaatatcggtcaaagccggattatagatccctttggcgtcaccattgcggcagcgtcagaaatgcctgcactcattatggcggaagtgacgcccgaacgtgtgcgtcaggtgcgcgcgcaactgcccgtcttaaacaaccgtcgctttgcgccgccgcaattattatgatgtttttttactcggcgcttgattcaccttgttacagattgctattgtgtgcgcgcgtcgaatgaccgttaatattctctggtttttaaggcgcgttctgttgccggttatatgtcaagaaggtatctatgggtgagattagtattaccaaactgctggtagttgcggcgctggtcgttctgctgtttgggactaagaagttacgtacgctgggcggagaccttggagcggccattaaagggttcaagaaggcgatgaatgatgacgatgctgcggcgaaaaaaggcgcagacgttgatcttcaggctgaaaagctctctcataaagagtgacgtggcgagcaggacgctccctcaatatcttgttcgatacaaaaaacccgcttcaaaaagcgggttttttatcagacagatgtaagtaattattacaggattacttaacttccatccctttcgcctgcaaatcggcgtggtaagaagagcggacaaacggaccgcatgcagcatgggtaaagcccatcgccagcgcttcggctttcatttcgtcgaactcatccgggctaacgtaacgttgaaccggcaggtgatggcggcttggctgcaaatattgccccagcgttaacatcgtcacaccatgacggcgcaggtcgcgcattacctcaataatttcttcattggtttcacccagtcccaccatcagaccagacttggtcgggatttccggatgcgcttctttaaagcgttccagcagcttcagcgaccagttgtaatctgcaccaggccgtacctgacggtaaatacgcggtacgttttccaggttatggttgaacacatctggtggcgttgcagtcagaatatccagagcacgatccatacgaccgcggaaatccggcaccagagtttcaattttgatttgcgggcttttttcccgaatggcagtaatgcaatccgcaaagtgctgggcaccgccatcgcgcaggtcatcacggtcaacggaggtgataaccacataacgcagcgccatatcggcaatggtctgcgccagtttcactggttcattggcatcaggagctaccgggcgaccgtgggcaacatcacagaacggacaacggcgggtacaaatagcgccgaggatcataaacgttgctgtgccgtggttgaagcattccgccaggttagggcaggaggcttcctcgcagacagaatgcaggccatttttgcgcattgcggctttgatgccctggatacgtgtagagtccgctggaagcttgattttcatccattccggcttgcgcagcagggcttcgcgctctgttgccacgtttttaaccgggataagggccatcttatcggcatcgcggtatttaacaccgcgttccatcacaatgggtttactcatagcgtgcgtgttccagttgcgaattacgaaggaaagcgtttcaattcaatagattgttgtaattatcaactatttttgaattaacgactggcagtatatcattgaaacggacctgaaagcagccaaagcggtcgcgaaaatgtaaaattgttgttggattgtgccattttatcgttctgcgctgtgatctggctgtaacaatactttttcaaaatgcattacggataacatctattactccgtgcaggatgggatcacgcaggctgaatttgttgtagtggatagagaaatctatttgctcctcatttaaggacggaaaaggcagtttttccagcggccagcagcggctaaacaggttataaaaacggctgggaataatcgctaacatgtcactgttggcaaccagtgcagcgattgtcaaaatgttgtagctggtgaaattgatttgccggtccggaaacatttcttgaactctctgccgcagaccgctgaaattttgctcttccggtaacagaagtacatgcgcagcgttgtcgatagtctctctgtcatcttctaaagagagtagtggatttccctcgcggcaaattaacaccatattgtcggtgaacagaacatgatgttgcaccgtacgattggtgcaaaacatgttatcgatgatgagatcggtttgaaactgactgagttggttttccgcgtcgctgatgggcgggttgcgcagtaaaagctgcggatagtgagttttaatcgcccgatagatgacaggaaggaccagtgctccgaccgagggagtggtcgcaatagttatcgttcgttgcttatcatagcttccttcgatatccagcgcgccaagaatggactcaaggccctgactgatatactcatgtagatgcatcgcaaatgcggtaggagtgacaccctggcctttgcgaataaacaatgggtcagggaatataacgcgcagtttctgaatagactgactgattgccgagggggtcagattaagcactttcgctgcattaacgatccctttatgtacatatacagcttcaaaaatagtcagaaggttaagatcaatatttcgtaaggttgtaaatatttgtggtttaccttctgacgactttctgcttaaacagggttcaatttgattattactatccacgcacttactccaattttattcatggaaaaataatatttaaaaaattacaataatcttatgtctaattggaacggaacgcttttgctcaccataatcaactatttcaataggttaatcaatggggtgagttacggagcaaggcgtggcaccgcatttctgcaagtgataaagaaaatatacaaacgcgaaggagatgtaaagcattagcagatattatgagtaatgacccagtgtaaattgggccattgatgtatggaattaagcggtaatatattcgaagtccggattgtttagtagcgctaaaatattttccagtaaacgtggagcaatattattagtcgtcgcttcgggtttccattgtgatattttagccatttccattccggcatacccacaaggattaatacgtaaaaatggtgaaagatccatattgacgtttaatgccagaccgtggaatgaacaaccgcgtcgaatacgtaaacccagtgagcaaattttcttttccccaacatagacacctggcgcgtcagcccgaggatgcgcttctatacccagttcagccagggtattcaccactgtttgctcaagcaaggtcaccagttcacgcacaccgagtttacggcgtttcaggttaagcaacacatacatcacctgttgccccggcccgtgataagtcacctgcccaccgcgatcgctctggatcaccggaatatcacccggcattaaaatgtgctccgcttttcctgcctgaccttgggtgaataccggatagtgctcgaccagccagatttcatcaagggtactatcatcgcgggtatcggtgaattcatgcatagcctgggagattggctcgtaaggctgaagaccgagctggcggacaagaattttatcctgatacaaaacggcatctccgtggagaatgagtaaaagtgggggaaaagtatatcacagcgaggagaggggagttacccgaccaggagccgggtaacggagaagcgagttacagaaccatgcggacaatatcgattttgcccagttcttcatacagtgtttcaacctgctcgatatgagtggcgttgatagtgatagataccgagtggtagttgcctttgctgcttggttttaccgttggggtgtagtcacctggcgcatggcgctgtaccacttcaaccacctgatcaaccagctcaggtaacgcctgccccataactttgtaagtaaaaggagtagggaattcaagcagttcgttaagtttggttttcatgtcagctccggcgtaacgtaattaaatagcaactcccgccagaaggcgggagttttttactgatgcttagtatatggggacggaaattacactttcaagtgtttaatttttaaccaaaccagtgatggaacattaatttaatgtaatcaatgattttgccgaagaagttaccttccgggatttcttgcaacacaaccagcgggcgttgctcgatcgttttgccatcaagctggaagttgatagttccgacgacctgattcttttgcagcggcgcatgcaattcactgctgttcagcacatagctggctttcagatctttcatgcgaccacgcggaatggtcaggtacacgtctttatcaacccctaacgaagcgcgatcagaatcaccaaaccaaaccggttcagaggcgaactctttacctactttcagtgggttaacggtttcaaagaaacggaagccccaggttagcagttttttactttcggcttcacggcctttaaaagtacgtccgcccattaccgcagaaatcaagcgcatctggccttcagtcgcagaagcaacaaggttgtaacctgctttgtcagtgtgtccggttttgatgccgtcgacattcaggctgttatcccataacaggccgttacggttcagctggcgaataccgttaaacgtaaattctttttctttatagatcgagtattcattcggtacgtcacggatcaatgcctggccgatcagcgccatatctcgcgcggagctgtactgaccatcagcatccagaccatgtaccgtctggaagtgggtatttttcaggcccagtgcgttaacgtagctgttcatcaagccaacaaaagcgtcctggctaccagcggcaaaatcggccatggcgacacaagcatcgttacccgattgcaggttaataccgcggatcagctgagaaaccggaacctgcatgcccggtttgaggaacatcagcgaagaacctttaaacaccgggttaccggtggcccatgcgtcgttgccgatagtgactaaatcagtttctttaaatttaccggctttcattgcctggccgataacgtaactggtcatcattttggtcaggctggcaggatcgcggcggacatctgcgttctgttcggcgagcactttgccggagttatagtcaatcaggatgtaggactccgcatcgatctgcggtacacccgggatcatagttttgatattcaggtcatcggcatgtgcagcagagataaaggctgtgcaaagagccgtggtgagcgccaggcgcttcatgatacgagcggaaaaaatggtattcatggtctgaactacgacatccgtgatggaattaaaaaagtgccctactatagcaaatgcactaccggcaggcatctgactttccgcgtgactttgttaacgtcatttacagaaattgacacatcagatgcctgctttacgctactgcgcggtagtaataaatgactgtaattgggcttcggtttgcaaacgttgctgcaaggtactggcttcggctttgctggcgaatgggccaagctggatccgccagaccgcgccattttgagttacgcgaccggggacgccgaacttctgtcccagttgctgttggtactgttgcgcacgagcctgatcgcttacggccccgacttgcaccataaagttgccgctggcgctttgcgagacggcttgcggtgtcaccattgcaggcgaggttgcaggcgttgtcgacggagctgtaacaacgggctgtggcgcaggcgtcggttcgctgccttccagtacaccaggcgctaaggtcgttggtgcgccgaggaaaccgctactggttaccggcgcgccggtcggatcttcgctttttagcgtcgaattactgaccggaagaatgtcaccctgcgggccagacactgaacttgttcccgcgccaccgcttaaatcgggaggtgcaggcagggcgtaagtctgtttggcgactgtggtacaagccataccaggaccagaaagcgaaccatcctgggcaacaataatcggatcgatacgaactttggtgttgtttgacgtgttaagacggtcagctgccgcgcgagaaagtgaaataacgcggtcgttgccgtaagggccgcgatcattaatgcgcaccacgatcattcgcccgttagccaggttagtgattctggcgtagctggggatcggaagcgttggatgggctgccgtcagctgtgtcggatcgaatgcttcgccagaggccgtcaggttactgccgggttcggcatcatagattgccgccagtcccgcctggctaaatcgagacggatcctgcacgattttgtagcttttaccgtcgcgctggtaatcctgatttgccgtcgcgttcagtggttcgaaacgcgggtccgccccgctaatttcaactatagggccgttacataccgcaggctgcggtacacttaccgtctgttgctgaccatcatcgcttgtacatgccgcgagcattcctgccgcgatgcagatcccgagccactgcttacgcattgcgcacctcttacacgcttttcgacaacattttcctgtgggtgtggattgacattacaatcccgaacccagccatcagcacaattagcgccgatcctccataactgaccagtgggagcggaacccctacaaccggcagaataccgcttaccataccaatatttacgaagacataaacgaataatatcagcattaagccgccagccatgacgcgaccaaaggtggtttgcgctctggcggctatccacagcccgcgcatgatcagcagaatgtagagagcgagcagaatcagaatgcccactaatcccagctcttccgccagtaccgcgaagataaagtcagtatggcgttcggggagaaattcaagctgtgactgagtgccgtgcagccagcctttgccgcgtaatccgccggagccaatagcaattttagactgaataatgtgatagcccgcgccgagtgggtctgattccgggtccaggagcatcattacgcgctggcgctggtaatcatgcatcaggaagaaccacagaatcggaatgaacgccgctaccagcactactgcgacgccaatcagacgccagctaaggccagagaggaacagtacaaacagaccggaaagcgcaacgaggattgatgttcccaggtcaggctgtgcagccaccagcagcgtgggcataaatatcagcaccagcgcgatgccagtgttcttcaacgatggcgggcaaacgtcgcggttgataaagcgcgcaaccatcagtggtacggctattttggcaatttccgacggctgaaaacgaacaataccgaggtccagccagcgttgagcacctttagagatggcaccgaaagcatctaccgccaccagcaaaataatacagatgatatagagatagggggcccagccttcataaacgcgtggaggaatttgcgccatcaccaccatgatgaccagacccatcgcgatttggccgattttacgctccatcatgccaatatcctgaccgctggcgctccagataaccagggcgctgtaaaccagcaatgccagtaagatcagcagcattgtgggatcgagatggactttatcccagaatgtttttttattcggattatccgtcatgattaatggtcctccgctgcggcaaccgctggattttccgcaggcagatcggtgttgttatcacccagcataatgtggtcgaggatctggcgcatcagtgtaccaaccgccggacccgcaccaccgttctccagaatcatggcgacagccacttgcggattgttgtatggcgcaaaggcggtcatcagtttgtggtcacgtaaacgctcggcaattttgtgcgcattataggtttcgttcgctttcagaccgaagacctgagcggtaccggatttcgccgcaattttgtacggtgcgctagcaaagtatttatgcgccgtaccgttagggcggttagcaacaccgtacataccgtctttcgccagctcccagtaaccggaatgaatatcgccgacgggcggttcatgcggctgtacccatggcacctgtttgccgtcttcggcggtgctcatcagcaaatgaggaaccttcacgataccgtcattaatcaggatcatcagtgccttactcatctggattggggtcgctgtccagtaaccctgaccgataccaaccggaatggtgtcaccctgataccacggttttttaaagcgtttctgtttccattcgcgggtaggcatgttgccggaacgttcttccgccaggtcgataccggtgtaatgaccataaccgaatttacccatccattcggagaggcgatcgatccccatatcgtaggccacctgatagaagaaggtatccgcagattcttccagcgatcttgtgacattcagacgcccgtggccccattttttccagtcacgataacgtttttccgaacctggcagttgccaccagcctgggtcaaacagcgtcgtattgcgcgtgatcaccccggcgctcaatgccgaaaccgccacatagggtttaactgtagacgcgggaggataaaccccctgtgtggcgcggttcaccagcggtgtattcggatcgttcaacaaggcggaataatctttgctggagataccgtcaacaaacaagtttgggtcataactaggcgtggaaaccagcgccagcaccccacctgtacgcggatcggtgactaccacagctgcgcggctacccgccagcagcgtttcaatatattgctggagtttgagatccagcgtcaggtaaatatcgtgtccggcttgcggtggtacttcttttaactggcgaataacacgcccacggttgttaacttcaacctcttcataaccggtctgaccgtgcagcacatcttcatagtaacgctcaatgcccagcttaccgatatcatgcgttgccgcatagttggccagtttgccgtcattattcaggcgttcgacgtctttatcgttgattttcgacacatagccgatgacgtgggtcaacgccgaaccgtaaggatagtaacgacgtttatagcctttaacttcgacacccggaaaacggtactgattgacggcaaagcgagctacttgtacttcggtcaggttagttttcaccggaatagaggtgaaacggtgtgaacgtgcgcgctcttttcggaatgcagcaatatcgtcatcggtcagatctaccacgctgcgcaaagcgtccagcgtttgctgcacgttatcgactttctccggcatcatttctatctggtagatagtgcggttgagggccagagggataccgttacgatcgtagataatgccgcggctgggcgcgataggcaccagcttaatgcggttttcattagagcgggtctggtagtcggtaaagcgaacaatttgcagattatacaggttggcgataagcacgccggtcagcagcaaaatccccaaaaaggcgaccagcgcccggcgcacaaacagcgcggactctgccgtatagtcgcgaaaagagttctgtagtttcatccgctgcgttttctactcaaagctcccttatcactcacggtgataaggatggttggtggtgatgctccacgcccggtacagactctctgcgaccagcacgcgaaccagcggatgggggagggtaagcgccgacagcgaccagctctgctcagccgccgctttacaggcaggcgacaacccttcaggcccgccaatcagtagactgacgtcgcgaccatccagcttccagcgttccagctcagcggctaactgcggcgtatcccagggcttgcctggaatatcgagggtgacaatgcggtttttgcctgcggccgccaacatctgctcaccctctttgtcgagtatgcgcttgatgtccgcattcttgccgcgttttccggccggaatttcaatcagctcgaagggcatatctttcggaaaacgacgcaggtactcggtaaaaccggtttgtacccagtccggcattttcgttcccacggcgacaagttgcagcttcacgcattaactccagagtttttccagttcatacaggcgacggctctcttcctgcatgacatggacaatcacatcgcccaaatccacgacaatccagtcggcgctgttttcaccttctacgccgagcggtaacaggcccgctgcgcgagactcctgcacaacgtggtcagcaatggacataacatgacggctggacgtacccgtacagatgatcatgcagtcggtgatgctggatttgccctgaacgtctaaggcgatgatgtcctgacctttgaggtcatcaattttgtcgataacaaaatcctggagtgctttaccctgcaagttttccccctgggtgaatcaaatagataaaaatggtctgtcagtatacctgaaccagaggcgatttcgggacaattgtcgccgaatcggctttcgaaagtgggctatcatcccaccccgcgccgcagattgcatcgccatttttgtaaaacaatttctacaaagtcgtgtctggcggaaaaagtctggctgcggagaatatcagcctgcccgggtctgtcaatggtcgttgcggcttacccgtaaaaaaacagaaaagtcatgcattctcgaccccgatggcacggctattgaggacgcgtagcgtcgcgaatttttggttgatatcaatggcgctccaacacccctggtcaacgcgaaaatgccacatagcttcggcaggcatgccaattaaacgggcgattaacagactcagtacaccctgatggctgacgactaaaatattctgatagtgctgaaattcactaagccttgcgataaagcgttccacacgttgcgaaaatgcctgaaatccttcaccgttcgtggggattgcatgctgccagtcattgcaccacgcgctatagttttcggcatcttcttgcatgaggtcgcgatgatgtcgcatctcccagtcgccaaaaaacatttcgttgagttcaggtatgatttgcacggggagctggcggtcactgagaaccagtcgcgcggtatgctgtgcccgttccagttcactgcataaaaccagatcaaaggaaacaccatgtagcagcgtatgcagattttgcgcttgctcaataccgcgcgcggtcaggggggtgggcgcatgaccgctgtaaagaccatcgatattcgcttgcgtttcaccatgacgaattaaccacagtcgcatcatgccctccgtaacgacaggtatcagcgatacaagccttgttggttaatgtaagtcagtaccggttccggcaataaatcctcacatgattcaccgttttgcaaacgttcgcggatgatggtcgccgagatgttaaaccacggcgtttcagccagataaattttaccggcaggctgaaggtgaagatcttccgggttatgtgtcaaatgatcttccagccattgctggtattgcggttgcgccatttcaagtgggtaacctggacgccgacagacgatcaaatgtgcattgtcgagtatcgtttcgtattcgtaccaggtcggaaaggtcagcagtgaatcctgaccaataataaacgccagcggcacgtccggtccttgttcctgccgccactctttcagtgtttgcgcagtgtaagagggggcattgcgctttagctcgcgttcatcaagagtaaataatggcttgtcggcaatcgccagttcaagcatgtgtttacgctgcacgctgttcgcttccggctggggacgatgcggaggaacattattagggatgattgtgacccgcgtcagaccaatcaaattcgccagcgtttccacgggttttagatgaccatagtgcaccggatcaaaggtgccgccaaacagagcctgtaaagatttcatatcaaccgtcgataaatacgtccgccaggggtttatggcacaacagaagagataacccttccagctctgcccacactgactgaccgtaatcttgtttgagggtgagttccgttcgtgtcaggagttgcacggcctgacgtaactgcgtctgacttaagcgatttaacgcctcgcccatcatgccccggcggttctgccatacccgatgcttatcaaacaacgcacgcagtggcgtatgggcagactggcgtttcaggttaaccagtaacaacagttcacgttgtaatgtgcgcaacaaaataaccggttcgctgccttccagacgcagttgctgaagaatatgcaatgcgcgcttactttttcccatcaacaaagcatcaacccaatgaaaaggggtgaaatgcgcggcatcattcaccgcctgttcaacgcgcggtaatgtcaatttgccgtctggccagagcagcgataaacgctccagtgcctgagccagcgccagcaggttaccttcataacagtagcagagcacctgatttgccgcgtcatccagttctaagttgagctgttttgcgcgcgcagcaacccagcggggaagctgagcctgctccggtgtctgacaggtcacctgcacgctgcgattcgcaagcgcagtaaaccaggcggcattttcttgcgctttgcttaatttattaccgcggacgatcaacagcaggtcgtcatgcagaagtccggtgagtgtgagaagttgctcattgatcgccgcattcggtccgttttctggtaacaacagcaatagcgtttgtcgactggcaaacagactcatagcctggcataacgaaaagatcgcattccagtcagtgttgggatcaatggaaaaagtgtggtgttcttcgaatccttgtgccgcagctacctgacgaacagcgtcctggctttcctgcaataacagaggatcgttaccaagtaaaagatacgccgcgcgcagcccttcattgagctgcgcgcggagttgttccgggtacaaccgaatcatcagttacccagcgtggtggagacgcgtgcaggcgttgccggagtatccgttgtggtcgacgtctgttcttcgtcggaacgaatatccgcagcacggatgcttggcagcttacgaatcagctgttcggcagcacggtcgtacatctcttttacgatcatgtcttgttcgttatctttcgctaacgccatttgcgggttatcgaagaacgaacggaagactttggcgctaatcgggtagatatcacggccggggatcaacacggtcgcattaaccgtcatgatcatctgatactctgctgtttgaccgttacggaataccgatgcggtatctttcgcgatgctcactttacccaaacgcaaggatggaacgtccttacgcgtggtttctttatcaagcaactcgacaccattcagacgtaactggttacgcaccgcacggcttaatggcccgttcggatcgcctgagtccaggatcatgaccttcatagtggaaggaacctgcgtggtatcacgcagatgccagccacacccggcggtgattaacaccgccagagataacaacaatgttgccagatatcgcacgcttcctcccgcgcttagccaacgaccagattgaggagtttacctggtacgtaaatcactttacgtacagtaacgccatcaagatattttgctaccagatgttcctggccagcacgttcgcgaacctgttcttccgttgcgtccaccggaacggtgattttggcacggactttaccgttaacctgcaccacgaccagcgtggagtcttccaccatcgctttttcgtcagcaaccggccacggcgcgttgtcgatatcgccttcgcctttcagttcctgccacagcgtgaagcagatgtgcggggtgaacgggttaagcatacggacaacggccagcagtgcttcctgcatcagagcgcgatcctgctcgccatcggttggtgctttcgccagtttgttcatcagctccataatcgccgcaattgcggtgttgaaggtctgacgacggccgatatcatcggtcactttagcgatcgttttatgcacatcgcgacgcagcgctttctgattttcagtcagcgcatcaacgttcagtgccgcaacatcaccttttgctgtgtgctcgtaaaccagtttccagacacgtttcaggaagcggttagccccttccacaccggattcctgccattcgagagtcatatcagccggagaagcaaacatcataaacagacgaacggtgtccgcgccgtaacgttcaaccatcacctgcgggtcgataccgttgttcttcgacttggacattttgctcatgccggtataaaccagttcatggcctgccgcatctttcgctttcacgatacggcctttctcgtcacgttcaacgatagcatcaaccggggaaacccagttacgttcgccgttttcgccaacatagtagaaggcatctgccagcaccataccctgacacagcaactgtttcgctggttcgtcagagttcaccatgcctgcatcacgcatcagtttgtggaagaagcggaagtagagcaggtgcataatggcgtgttcaataccaccaatgtagatatccaccggcagccagtagttagccgcttcggaatccagcataccttctttgtactgcgggcaagtgtagcgcgcatagtaccaggaggactccataaaggtgtcgaaagtgtcggtttcacgcagtgctggcataccgttaacggtagttttcgcccactccggatctgctttaatcgggctggtaatgccgtccattaccacatcttccggcaggatcaccggcagctggtcgtccggggtcggcattacggtaccgtcttccagcgtcaccatcggaatcggcgcgccccagtaacgctgacgggaaacaccccagtcgcgcaggcggtagttcactttacgctcgccaacgcccatcgcagtcagtttatcggcgatggcgttgaaggccgcttcatggtcaagaccgttgaactcgccagagttgaacagcacgcctttttcagtcagggcttgctgagaaagatctggctcagagccgtcagctgccaggataaccggtttgatgttcaggccgtatttagaggcaaactcgtagtcgcgctggtcgtgccccggtaccgccataactgcgcccgtgccgtactccatcaatacgaagtttgctgcccaaacgggaatttcttcgcccgttaatgggtgaaccgctttaaagccagtatcgacgccttttttctccatcgtcgccatttcagcttcggcaactttggtgttacggcattcgtcaataaaggccgccagttcaggattattttccgccgctttctgcgccagcggatgacccgcagctaccgccaggtaggtacaacccataaaggtgtccgggcgggtagtgtaaacggtcagcgtgttgtcatagtcgttaacgttgaaggtgatctccacgccttcggaacgaccgatccagttacgctgcatggttttaacggtgtctggccagtgatccagtttatccagatcgttgagcagctcgtcagcgtaagcagtgattttgataaaccactgcgggatctctttacgttcaactttggtatcgcagcgccagcagcagccgtcgataacttgttcgttcgccagtacggtctggtcgttcgggcaccagttgaccgcagaagtcttcttatataccaggccttttttatacagctcggtgaagaatttctgttcccaacggtagtattccggcgtacaggttgccagctcgcggctccagtcataaccaaagcccagcattttgagctggtttttcatatacgcgatgttgtcgtacgtccacggtgccggagcggtgttgtttttcaccgccgcgccttccgcaggcagaccaaacgcgtcccagccgatcggctgcaggacgtttttgcccagcatacgctggtagcgggcgatcacgtcaccgatggtgtagttacgtacgtggcccatgtgtagtcgaccagaaggatagggaagcatagacaggcagtaatacttctctttgctctcgtcttcggttacttcaaatgtgcgcttctcatcccaatgaagctgtactttggattctatctcttccgggcggtattgctcttgcatggcagccagtggtcctgttttcaatacggctacaaatgtagcgttgaggtggtttttcagatccgcatagcatagcccaaacgtccgcgtcaaaacagcctttcgcgcactcgacgttgaaatgatgcccggattattcatacattaatttacagagtttgtgggcgtattagcaaagcaaggaacaaagaacgtctattattatagtcagttaacgacccgggagatgaaacgatgaacaaggttgctcaatattaccgtgaactggttgcgtcactgagcgaacgcctgcgcaatggcgaacgtgatatcgacgcactggtggaacaggcgcgcgagcgcgtaataaaaacaggggagttaacgcgaaccgaggtcgatgagctgacgcgagctgtcagacgtgacctggaagagttcgccatgagctatgaagagagcctgaaagaagaatctgacagcgtctttatgcgggtgattaaagaaagcttgtggcaggagctggcagacatcaccgataaaacgcagcttgaatggcgcgaagttttccaggacctcaatcatcatggggtttatcacagcggagaagtggtcgggctgggaaatctggtctgcgagaaatgtcacttccatctcccgatctacacaccggaagtgctgacgctatgcccgaaatgtggtcatgaccagttccagagacgcccgtttgagccgtaatagtctgatttcgcacagcaataaagagaatatgggccgaatgaaattccccggcccttgtttttatctctacagtaaatcttcagtctcacgaatttcctgactgacatctctggttccggatgactgaactttacgatacaggtcgagagcctgtcggagatcgacaggtcttccttctccgtagtgatacataatggccaggttataccaggcagtggcgtcattgcattcagcggctttcgtaaaccattcaaaggcagcctgataatctttctcaacgccttgtccgtgtttatacatataaccgatgttgacgtaagcgccgacgctcccctgagcggcagccttcagataccagtacatcgcttgcttatagtcctggtccaccccttcgccagcgttataatcccatgcaatttgaaactgggcgtgccgattaccctgctgtgcgcttttcaaataccagaatgcggcgagtgtcttgttttgagcaacgccttttccgtcttcataaagatcggccagattgttttgcgcgtcactatggccttgtaatgcagcttgtttgtaccagaaaaatgccagcgcatagtcttttgcgactccgttgccatttctgtacatccacccaagattattttgcgcataagacattccgctctccgcggctatctgataccagacaaccgcttctttataattgggggcttctccacgatccagtgtccagccaagggcgttggaagcgaaagtatggccttgtagggcagcttttttcagccagaagatggcttgctcattatctttatgacggcttttatcctcggtatacttttgccctaaggaatactgtgcttcacaatgaccttgctcagcggccagcttcagccagtaaaaggctttttcgtcgtccggagaatcaattgcgctatcgcgattataataaaacccaacaatatattgagcctcgcaatcgcctttttcagcacgttcgataatctcatctattgataaattatcgcagcaacttgacgtgaaaatcattatcatttccttatggttgcagataaaacatattatatttttatgtgttccatttttgcgtaagccttattttatgcgtattatgtcgcgtcagaaaagtataaataaacgagcctcgcaatgcggctaatattcatttaatgaatatttaaggataaattatatggacatggagtcgcaaaaaatattgtttgcactttccactccgatggaaatacgcaatgaatgctgtttaccttcgcattcatcacccaaaatgtatttaggtacatgcttttttgacctttcttcctcatggggaattgatgaccgtgatgacctgctgcgcacaattcaccgaatgatcgataacggtcatgccgctcggttggcagggttttatcaccgctggtttcgttattcgccatgtgaatggcgtgactatcttgctgaactaaatgagcaaggtcaggcttatgcgcaatttgtcgccagcaccgccgaatgctgtggcgaagggggaatcaaagcctgggattatgtccggatgggttttttaagccgaatgggcgtacttaataactggttgagcgaagaagaaagtctatggatccagtcgcgcattcatctacgggctctacgttattatagtaactggcggcaatactttgccggttatacctttggtcggcaatattggcagtctcccgaagatgatcatctgcctttattacgcgaattcttagcgcgtaaagaatacgacgattccggcaatgatatgttttatcaattatttgccagtgatgatgcgtattaccctaccttgtcctggcaaccattggcttactattctgcatgcccggaaacgcttaaggatatgagcgacctatgaaaaattgctggaagatcctcgatatagaggaaacgactgacgtcgatattatccgccgcgcttatctggcgctgttaccgtcctttcatccagaaaccgatccgcagggttttaaacaacttcgtcaggcgtatgaggaggcgctacggattgcgcagtcgcctgctaaatctgtttggcaaccagaagaatatgaggtagcagaacatgaaattctgctcgcctttcgtgcgttacttgcctctgatagtgaacgttttctgccctccgcctggcagcgattcattcagcaattaaattattgctcgatggaggagattgatgaattacgctggtcgctgtgcacaatcgccatgaacactgcccatttatccttcgagtgcgtggtgttattagcagaaagattgcggtggttacaggaggaaaataccggggaaatagacgaagaagaactggaatcctttttatatgccattgcgaaggggaatgtttttaacttccagaccattctgcatctgcccgttgccgtgcaaaatgacaccatcgatttttaccaaatgttcgctcggatttggtcatcgcatccacaatggctgacattgtatttagcgcaacatcgcgcagtgattatccccgatgatgcaaaactgcacagaaatttactccgctggtatagcgcaggtcgcctggatatccccgaacttctggattacgcccagtcatggcgggaaactgaacctgataatgaagatgcgccttattatgaatacgcgcaacgcgtctattgtggagaaggcgaaagcctgttggcagaactttgtgactactggcgcgagtatccctccacccaggcggatgctttaatgttgcaatggtgccgtcagcatcgggtcgattattacccattactggtgatgatgattgaagcgcgtgatctggttaacgatcagggaaaaccgctactttatgtccccggcgacagcgcccgtacgcgttttcatttatacgaaatactcagcgatgaaaaactctctgcgctggggcgttcactggtcgagatggttttgcacaaaggacgtaagccgcggatctcactcacgcgtgatacagaacataccttatggccattatatctagttgccaaacaattagtgcaggcctgccaacctacagaagaatcattaatgccgattgtgagccgccttgatgcagaaaatcgttgtccactggaagcattaattattcgtcgattattaattcaggcggcgaattttaccgagaagcaaactgttgaaccggagccgcaaccgcagccaatgcccgttgacgatggtgggccaggctgtctgggcatcattaaaattattttctatatttttatctttgctggtttgatagggaaaatactccatctgttcgggtgacagtcgacgttaatgtgcgggaagcccggcaagtaatctttccgcatttttgtaatgttgtttggcggtcagttttaaccatttttgagattcataatggttaacattaatacctgagccatttctgtagatcaaacctaaagtatattgagcatgagcatacccttgttcagctgcttccttataccagagaattgctttacgggtgtcgggtttgacccccagacctttgaggtagatccaccccagtttactttgcgcgcgtggattttcctgttccgctgattgctcataccagtatctcgcctgtgtataatccagtggtttaccgtcgctaccatgaagataaaattctccaaggcgatattgcgacgttgagtgaccatgaatcgcggaaagctccgtggctgccgtggtgaatggaagactgcccggtgagcttaaataatcaaaggcataattcaccatggctttatcacgcaacgtcgttttcttgggttggctaatacaggtaattgctgcaactataaaaattgcgaatatatacattaattttttattcatgtgtgaatgcttcgattttctttttattttgaaagcgtcaagtttatactcatcaataataaaaaagtagtcagttaatgcacttaagggattattaacaaatgaataaggaagaacaatatcttctttttgcgctttctgcgcccatggaaatacttaatcagggttgcaaacccgcgcatgactcgccaaaaatgtatactgggataaaagaattcgagctctcatcatcctggggaataaataatcgtgatgatttaattcagactatttatcagatgactgatgatggtcatgccaatgatttagctggcttatatctgacatggcatcgctcttcccctgaagagtggaaagcattaattgctggtggctcggagagagggttgatttatacccaattcgttgcccaaaccgctatgtgctgtggggaagggggaatcaaagcctgggattatgttcgaatggggtttctgtcacgggtcggtgtgctcaacaagtggctgacggaagaagagagtttatggctgcaatcgcgcgtctatgtacgagctcaccattactatcacagctggatgcactatttttccgcctattcgttaggacgtctctactggcaatcttctcagtgcgaagacaacacttcgctacgcgaggcgctaaccctgtacaaatacgatagcgccgggagtcgtatgttcgaagagctggcagcgggaagcgatcgtttctatgccacgcttccctggcagccattaactgtccagtctgaatgcccggtaacgcttaaggatgtgagcgacctatgaaaacatgttggcaaatcctcgaaattgaaagcacgacgcaaatagacattatccgccaggcttatcttgctcgcttaccgttgtgtcatcccgaaaccgatccgcaagggtttaaagcattacgccaggcctatgaagaggccctgcgactggcggtaaatcctgtcgaggaagcagatgatgaagaaaaagatgctgccgctgaacatgaaatactacgtgcattcaggacattactggattcagaaagtgatcgttttcagccttccgcctggcagaaatttattcagcaattaaatacctggaacatggaggatgtcgatcaattacgctggccgctgtgtgcaatcgccatagaagcgcgatatctttcattaaattgtgcttctttgctggcagagcgtttgaactggcattcatttaatgacagcgaaggaatggatgaggaagaaagggaggcttttcttgaggccattcaggctggtgattgtttcgatttccttagccttctggaatatcccattgcgttgcagaaccagactgttgagtattacttcgcgctggaacgttgctgccgttaccatcctgactatgtcactgcgtttttggcgatggaaggtccgtggttaattcctgatgatgcaaagttacatcgcaaactgttgcgctggtacagctcggtgcaaacaggtatggcggaactcattcctgtcgctcaacagtggcaaacggaagaaccagaaagcgaagatgcccggtattacttgtgtgcacaacgtttgtactgcggcgagggggaaagcctgcttgccgatctctgcgcgtactgggaaagttacccatctacacaagctgataatttgttgttgcagtggagcaagcgtcattgcccggattatttcgcgttattagtgatggttatcgaagcgcggagcatggtagatgcgcaaggtcaaccgctgaaatatgttcctggtgagagcgcccggacgcggctgttatgggcggagattttacatagcggaaaattatcgccgttaggtcaatcgtttattgagtcgttattcttcaagcgcaaagcatgggcgtggtggaaatcgagagtcggtagcgagacagagcaagattcaccgttcctggatttgtatcgggtagcggaacaggtagtacttgaagcgtttccgaaacaagagatgctggcccgtcttaatacaaggctggaaggcggagatgctcatccattagaggccattgtcacccggatgcttttgacgaaagtgaaactcgagccggaggatgaagatgtcgatgagccaacacctgaaaatcatgaagaaaaaaatgatgagggtgaaaaaccacagagcattaccagcattatcaaaatcagtttaacggtgctggtgataggttatgctctcggcaaaatcgcgatgttgtttagctgacgatgtgttttttgcgccgatgccggatgcagcgtttacgccgcatccggcagccgtgtttatgggatctcaatggctaaataatcgctcgcccgccgccgaacttcatccacgcgggccatatcgtttgactgcaacgccgcatcaaaatcggtgatcacccggccgatctcttctcgctcgtcacccagcgcccgcgcccacaactcttccagtttggctttaaaggtgcgattgatgagcatatcgcgcggataaattttcaatgcggataaccgcgtccgactctcttcaatctgctgcgcgctcaatgttaccgggctgtggttaatcactctggacttaacgctgccgtcttccagaagcacgtcaacttcaagcaacccgttgatatcataactaaagcgaatatcaatcgactgataagccccggttttcttcaacggcacatcgaaggattccaccagaatgttgtttttaactttgtggttttctccctgatagacgttaaccgtaattgaatcctgttccgggtgcatggttgaataagtttctacacgcgacacgggcacagtggtgtttcgttcaataatcggcgagaaaatgccggaaacgccctggcggttaacttcaacgcccaacgagtaagggcaaatatcagtgaggattacctcttcaatatcttcactgcgtaagcggcaggcggcctggattgctgcgcccagcgcgacaatggtgctcggatcgtaactttgatacggtaatttgccaaacagacgcacggcgattcgctgcaccagcggcatttgtgacgcgccgccaaccagcaccagactgtcgatttgactcggcttcagacgcgcatcgcgcaacgcctgttcaatcggcactcgcaagcgattgagcagcggcaaccacaaatcttccagttcgttctcgtaaaattcgcattcccgcgtttcttcctgatactgccagcgaatgtgcaatggcgattgattgctacattttgccgcttccacacaggcgtacaaggctgccagttcactctcgttaagcgtggtcctggcgacatccgcgcgttttaaaacctcatcgaccagcatatgggtaaaatcttcgccaccaagaaagttgtcgccagcggaggcgtgaacttcaatcaccggcgtggcgtactcaagcaccgtaacgtcaaacgtgccgccaccgagatcaaacaccagcgaacgggtattttgttgggtatgcaggccatacgccatcgcagctgctgtgggttcattaattaagcgtaccgcatttaacccggctaactccgctgctaaacgggtatgcttgcgttgttcatcgctgaaataagccggaacggagatcaccacatctttaatcggacgttgcagaaattcttcggcatcttcttttaatgagcgtaataccaaagaggacagttctggcgcgttaaatgtgtcgctgcctaaccgccagttggtattactgcccattgcacgtttaaataacgctgccgttttatccggatgcgaagtacgccgtgatacagccggttttccgactaaaatatgattattttcatccatgctaattatggatggtgttaaatattcaccgaacttatttggaattaattgcgcggcaccgtctttccagacggcaattaaactattggtagtaccgagatcgataccaatggcgagttctgcattatccattgcatttatatcttgaaagaaaaagagataaacagattaagaccacccaggtaacgcgtggtgatcttaatcaatgacgtgtgttaagcgtaaaatttcagacgatcagccagtaaatcaacaaagccctgacgatcaacatcgaccattacggtggcattcggtttattgcctgtcagataataataatcaacaaccgtcataccctgggtatatttcccctgtgtttccacgccaacccagcgctcaacagaggtaaataactccggtttcaacagccaggcgatggtgcatgggtcatgcagtggtgcgccgacaaagccccatttttcgtctttatgatattcgaggaagaaatccagcagttcggcaacaatggttgaaacagggttaccaatcgcgcggaaacgctcggtgtcttcaacgtggatttgtgctttatgagtaacatccagaccggccatcaccaccgggatccctgactggaagacaatttctgccgcttccgggtcaacgtaaatattaaattcagccgcaggcgtccagttacccagccccatagcgccacccataatcacgatacgggcaattttgctatgcagttccggatggctattgagcagcaaggcaacgttagtttgcggtccggtagacacaatggtgacaggttccgcactttcacgcagcgttttcgccatcagctctaccgccgtacagttttgcggtgcgaatgtcggttccggtaatgccgggccgtcgagaccgctttcgccgtgcacattgtccgcgataatcaactcacgcattaacggttttaccgcgccgcctgctaccggaatatcggtgcgattaagcaaggtcagcatacgcagaacattgcgtaaggttttttctggtgtctggtttccggcggaagacgtaattgctttgacatcaagctctggtgaggcgagggcgagaactattgcgatagcgtcgtcatgacctgggtcgcaatctaacagaattggcagtgccattgttgctccttgttgtgtgcttctttgcgacaagggtaacgccaggatgtaacagatacgaggggcgaaacgataaagcgtgagatggcgcgcaattgggtatgcgcgccagagtgattaatgcaggattttcgcgaggaagtcttttgcgcggtccgatttcggatcatcgaagaaagcgtctttcggcgagtcttcgacaattttaccctcgtccataaagatcacccgattcgccactttacgggcaaagcccatttcgtgggtcaccaccatcatggtcattccttcgttcgccagttccaccatcacgtccagtacttcgttgatcatctccggatccagcgccgatgtcggttcgtcaaacagcatcgcaataggatccatacacaacgcgcgagcgattgccacacgctgctgctgaccgccggaaagctgcgccggaaacttattggcgtgagcagaaagcccgacacgctccagcagtttcagggctttttcacgagccggcgctttatcgcgtttaagcactttcacctgcgccagggtcaggttttcgataatcgacagatgagggaacagctcgaaatgctggaataccatcccgacgcgggaacgcagctttgccagatcggttttcttgtcgttaaccacgataccatcgacggtgatttcaccttgctgcaccggttcgaggccgttgacggttttaatcagcgttgatttgccggaaccagacgggccgcaaaccaccaccacttcgccttttttcacttcggttgagcagtcggtcagcacctgaaagtgaccataccattttgaaacatttttcagggtaatcattatgctgtccttcttttcaagtagctgaccaacaacgacgcgctaagactaataacgaaataaacaaatccggcaaacaggatcatctcaacctgcgtaccatcacgctcaccaatggttgaggcggtacggaagaaatcggccagggataacacatacaccagtgaggtatcctggaacagtacgatgccctgagtgagcagcagcggcaccatcgcgcggaacgcctgcggcagaataatcagtttcatcgactgccagtgagtcattcccaacgccagcgcggcgctcgattgaccacgagaaatactttgaataccagcacggataatctctgaatagtaggccgcttcaaacatcgaaaacgccaccatcgccgaaattaaacggatatcattttttggcgataatcccagcacgttttgcagaaaacccggcacgatcaggtaaaaccacagcaaaaccataactaaaggaatcgagcggaatacgttaacgtaggctttggcaaaccacgccacgggcgcaaagctggataaacgcatcaccgccagcatcgtgccccacaaaataccaatcactaccgccgtgacggtgattttcagggtgatcaccagcccgtcgagcagatatggcagggaagggacaatggaactccagtcaaactcgtacattatttgccccccatgttgccaggcaggcgaactttacgttcaaccagcgtcatcaccagcatgataaaagcgttaatcaacacatacgccagcgtaatggcggtaaacgactcccaggcatgggctgagtaatcgagcaatttacccgcctgcgccgccatatccaccagaccgatagtcgaggcgatggcggagtttttcaccaggttcatcatctctgaggtcatcggcgggacgataacgcgataagcattaggcagcagtacgtatcgataagcctgcggtagcgtcaggcccatcgccagcgcggcatttttttgccctcgcggcagcgactgaatcgcggcgcgtacctgttcgcaaacacgggcggcggtaaacagccccaggcagagcatggatgaaaggaaaaactgaatattgggatccagctcggccttaaaccacatgccgattttctccggcagcagctccgggatcaccagataccaggtaaagaattgcacaatcaacggcacgttgcggaacagttcgacatacaacgtacccagaccagagagaaaacggtttggaacggtacgtaaaatgccgaaaaatgaaccgacgaggaaagcgataatccaggcgcagatcgacaaagcgatcgtcacctgaaaaccactccagatccaaccaagataggtggtgttgccgaacggggcttgttgtaaaaaaataccccagttccagtctatagacataaatctactccagaaaaaagagggtagcagcgttaactgctaccctcgaagattgttacccagcgtattgcggttttcaggcccgatggggaacgaccatcaggcgtatagtctgtccgtgctacgtaacaatcgagagggctggaatttccgcccctggttcttgtaattagttcagtgccttgtcattcggttctttgaacagtgctttcatttcgtctgacagttcgaaattcatgttcaggtttttcggcggaattggatttttgaaccacttatcaaaccatttttccgcttcaccggaggtctgcacctgagcgatggtgtcatccatcagctttttgaactgcggatcatctttacgcaacatacaaccgtaggcctcctgagactgcggcttgccgacgatttcccagttgtctggtttcttcgctttcgcacgttcaccggccagcagagcgtcatccatcataaaggcaacggcacgaccgctttccagggtgcggaaagagtcaccgtgatctttggcgctgatgatgcgcatattcattttttgctcttcattcagtttgttgagcaaaacttcagaggtagtgccggaagtgacgactacggctttgtctttcaggttggcaaaatctttgatatcgccaccctttttggtcaacaggcgcgtaccgaccacgaaaatagtgtcagagaaagccgcctgtttttggcgttcgacgttgttggtggtagaaccacattcaaaatcgaaagtgccgttttgcagcagtggaatacggttttgtgaggtaatcggaatcagttttacctgcaagtccggtttgttgagtttctttttcactgcttcaacaatggcgttggagtaatcctgcgagtaacccaccactttttgctgattgtcgtaataagagaaaggcactgaagattcacggtgaccgacgacaatcacaccgtttttggcgattttgtccagagtactgcccgctgccggggcggcgtcatctgcctgtgccagtcctgcggaaagcgccagggcgaggattgctgtggcaggtttacgtaattgcatatccaactcctttatcttctgcgttaagaacgcatggatacccgttgtgagtgtttgtgttgttatcgtctgcaactttattgtgcagtgttgtgcctgttagggaaggtgcgaataagcggggaaattcttctcggctgactcagtcatttcatttcttcatgtttgagccgattttttctcccgtaaatgccttgaatcagcctatttagaccgtttcttcgccatttaaggcgttatccccagtttttagtgagatctctcccactgacgtatcatttggtccgcccgaaacaggttggccagcgtgaataacatcgccagttggttatcgtttttcagcaaccccttgtatctggctttcacgaagccgaactgtcgcttgatgatgcgaaatgggtgctccaccctggcccggatgctggctttcatgtattcgatgttgatggccgttttgttcttgcgtggatgctgtttcaaggttcttaccttgccggggcgctcggcgatcagccagtccacatccacctcggccagctcctcgcgctgtggcgccccttggtagccggcatcggctgagacaaattgctcctctccatgcagcagattacccagctgattgaggtcatgctcgttggccgcggtggtgaccaggctgtgggtcaggccactcttggcatcgacaccaatgtgggccttcatgccaaagtgccactgattgcctttcttggtctgatgcatctccggatcgcgttgctgctctttgttcttggtcgagctgggtgcctcaatgatggtggcatcgaccaaggtgccttgagtcatcatgacgcctgcttcggccagccagcgattgatggtcttgaacaattggcgggccagttgatgctgctccagcaggtggcggaaattcatgatggtggtgcggtccggcaaggcgctatccagggataaccgggcaaacagacgcatggaggcgatttcgtacagagcatcttccatcgcgccatcgctcaggttgtaccaatgctgcatgcagtgaatgcgtagcatggtttccagcggataaggtcgccggccattaccagccttggggtaaaacggctcgatgacttccaccatgttttgccatggcagaatctgctccatgcgggacaagaaaatctcttttctggtctgacggcgcttactgctgaattcactgtcggcgaaggtaagttgatgactcatgatgaaccctgttctatggctccagatgacaaacatgatctcatatcagggacttgttcgcaccttccttaggtaacatttagtttggctaaatgtaaagatattgctgttttattgtttgtttttgcgagatgcgccgcaccattccgaagcaaaattcttaaaatgcactcttttagtgctaccgctggattactgtggtgcaactaggttgtactgatgctgtttcagggtttgccttgtataacaaagcaatagatgtgccaaagttggataggagaatattgttatccggataatgcactgatgccgcatccggtgagcgtgccgaaatatgggatgtattccggcacgataagaagggattatttacgtcgctgacgcagactcatcaacacagcagcaaaaccaaacaatgccgtcagcacccacagcggccagttgccggtacgtgcgtatggtgtgagtccggtggtcggcgtcacgttagtggttaacacctcgcgggtgaactgcgggatcatcgcctgaatctcaccctgcgggccaatcaccgccgtaatgccgttgttggtgctgcgcaacagtgggcgcgccagctccagcgcacgcattcgcgccatctggaagtgttgccatggaccaatagatttaccaaaccacgcatcgttggagatagtcagcagatagtcggtatccgggcggaagttatcgcgcacttgctcgccgagaatgatctcgtagcaaatagccgcagtaagctcaataccatttgccgacagcggcggctggatatatggcccacggctgaacgacgacatcggcagatcaaagaacggtgctaacggacgcagaatcgactccagcgggacaaactcgccaaacggcaccagatggtttttgttatagcgatcggctgattcgtagctgtacggcgcacctttacccagcgtgatgatggtgttgtaggtatcgtagcggttctgcttattgagacgcgcgtcgacaatcccggttaccagcgagctacctttatcacgcaactcaccgtccagtgctttgaggaacggttgctgattaatttccagatcggttatcgccgactccggccagataatcaacgatgatttgcccatcagcggtgccgttgcgttgtagtaaatcttcagcgtattaagaagctggccttcgtcccatttcagcgattgcggaatatcgccctgaaccatcgaaacctgaatggttttctccggttgtggggtaaaccactggatgtaacgcagcgggaagggaagggcaaacagcacgacggccaccaccagcggacgccagttgcgtttgaccaacgccagtgccagcaggccactaaccatcatcagcaggaagttaatggcttccacgcccattatcggtgccagcccttttaacgggccatcaatctggctatagccgaactgtaaccacgggaagccggtcagtacccaaccgcgcagaaactcggtcacttgccagagggcaggggcggcaatcgctacgcgcagccaggtggttttcggccacagacgcgacagcacgccagcaaacagtccggtatacagcgacaaatacgccgccagcagcaccaccaggaagatgttaaccgggccaggcattccgccaaaggtcgcgatgctgacatagacccagttaataccgctgccaaagaggccaaatccccagcaaaagccaatagcggcagactggagtggacggcggttaaaggtcaacgcctgaagccccatcagcgaaataatcgccgcaggccagacgtcgtaaggagagaaggccagcgttccgcaggcaccgaataataacgccagcagcaggcgaatgcgctggcgttcaattaatgaggcaaaagccatgtagttatctatccagtttcggttttattcatccagcttcggctggggtgagtcatccgggattttgacatgaacctgaataatacgccgactgtcggccatcgccactttgaactggtaaccgtcgatgtcgatagtttcgccacgcgccggaagatgcccaaatgcctgcatcaccagaccaccgatagtgtcgacttcttcatcgctaaagtgggtgccgaacgcttcgttgaagtcttcaatggaagccagtgcgcgtacggtccaggtatgacgactcagctgacggaagtcgatatcatcttcttcgtcatactcgtcttcaatctcaccaacaatcagttccaggatgtcttcaatggtcaccagaccggaaaccccaccgaattcgtcaataacgatcgccatgtggtaacgctgagagcgaaactctttcagcatccggtctacgcgcttactttcaggaacgacaaccgcctgacgtaacactttgtccatgctgaaggcttcagcatcgctgcgcataaacggcagcaagtctttcgccatcagaatcccttcaatgtgatctttgtcttcgctaatcaccgggaaacgtgagtgggcggactcgatgatgacatcaagacattcgtccagcgtctggttgcgtttcagggtaatcatctgggagcgggggatcatgatgtcgcgaacgcgttggtctgcgatgtccatcaccccttcgagcatatcgcgcgtatcttcgtcgataaggtcgttctgcccggaatcacggatcagcgccagcagttcgtcacggtttttcggttcaccgtggaaaagttggctgagtaacagggagaaaaatcccttcttgttgcttatcgtgtcactactgtgtgaattgtcgtcgctcatggcgtcgtatgggttctcatgttagttaatcaaaacgccgtcgttaatcaccaacggcggggacgtctgccagtcaaatgcctggcaaattattctttctcggcaatgtacggatcctcatagcccagagcaagcataatctctgtttcgagggcttccatttcttctgcttcgtcatcttcgatgtgatcgtaacctaacaaatgcagactgccgtgcaccaccatatgcgcccagtgcgcctccagtggtttgccttgctcctgagcttccttctcaaccacctgacggcagataaccagatcgcccagtagcgacatttccatgccaggcggcacttcaaacgggaaggagagcacgttggtcggcttatccttaccgcgataggtcagattcagactgtggctttcggcggtatcgaccacgcgaatcgtcacttccgattcttcctgaaactgcgggatcaccgcattcagccatgtctgaaactggctctcttccggtaacccggaattatcttcacatgccagttgtaaatcgaggatcacctgactcatttttgttcctgttcttcgcgcttgcgttctgctgccagcgccgcttttcgtttttgttcggcttcttcccaggcttcataggcgttaacgatacgcgccaccacagggtgacgaaccacgtcttcgctgtggaagaagttaaagctgatctcttcgacatcggccagcacttcgatggcgtgacgtaagcctgatttagtattacgcggcaggtcgatctgtgtgacgtcgccggtgataaccgcttttgagttaaaaccgatacgggtcaggaacatcttcatctgttcgatggtggtgttctggctctcatcgagaatgataaacgcgtcgttcagcgtacgaccacgcatataggccagcggtgcgacttcaataacgttgcgctcaatcagtttctcgactttctcaaagcccagcatttcaaacagcgcgtcgtacagcgggcgcagatacgggtctactttctggcttaaatcgccaggcaggaagcccagtttctcaccggcttctactgccggacgagtcagcagaatacggcgaatttcctgacgctccagggcatcaactgccgcagccactgccaggtaggttttacccgtacccgccgggccaacgccgaaggtaatgtcatggtcgagaatattggcgatgtactgcgcctggtttggcgtgcgcggcttaattacgccgcgtttggttttgatattgaccgctttgccgtactccggcacgctctccgcgctttgctccagtacccgcgcttctttaatcgcaaggtggatctgttccggttcgatatcctgaatctgaccgcgcatcggggcagtatcgacatacaggctacgcagaatgtctgccgcagcggtgacgcaaatcggacggccggtcagtttaaagtggttatcgcggcgattgatctcgatgccgagacggcgttcgagctgcttgatgttgtcatcaaacgggccgcacaggctcaacagacgcgcattgtctgctggctccagggtgatttcgcgagtgtctatgttcaaaccgttcctcttatctgtatgccgccggaagctgaacattcaccggcctataaggaaattattcacgccacaggaaaaaggcgcaagcattgcaataaagatggggataaagagagaaaaaacaaggcccaccggaacggcaggcctgagaattacggctgataataacccacgccaaggtcgttttctttgcgggtacgggcaatcactgattccggtgtttctgccacgcgcagacccatttcatcttcagtacgcaccactttaccgcgcagagagttcgggtagacgtcggtaatttctacatcgacgaatttaccgatcatatccggcgtgccttcgaagttgaccacgcggttattttccgtacgcccggaaagctccatgatgctcttacgcgatgtaccttctaccagaatacgctgggtggtgccgagcatccggcggctccacgccatcgcttgctgattaatgcgctcttgcagaatatacagacgctgcttcttctcttcttccggaacatcatcaaccatatcggcggctggtgtacccggacgtgcagagaagataaagctgtagctcatgtcgaaattgacgtcggcaatcagcttcatcgttttctcgaagtcttcggtggtttcgccagggaagccaacgatgaaatcagaactgatctgaatatctggacgcgccgcacgcagtttacggatgatcgctttgtactccagcgccgtatgggtacggcccatcaggttcagaatgcgatcggaaccgctctgtaccggcagatgcaggaagctcaccagctccggcgtgtcgcgatacacttcgatgatatcgtcggtgaattcgatcggatggctggtggtaaagcgaatacgatcgatcccgtcgatcgcagcaaccagacgcagcagatcggcaaacgatccggtggtgccgtcgtagttttcaccacgccaggcgttcacgttctgaccgagcaggttgacttcacgcacgccctgagccgcaagctgggcaatctcaaacagaatatcgtcggacggacggcttacctcttcaccacgggtgtaaggcaccacgcagtaggtgcaatatttattgcagccttccatgatggagacaaacgcggtcggcccttcggcgcgcggttccggtagacggtcaaacttctcgatttccgggaagctgatatctacaaccgggctgcggtcgccacgcacggagttgatcatctccggcagacggtgcagcgtttgcggcccaaaaataatatcgacatagtgggcgcgctggcgaatgtgctcgccttcttgcgatgccacgcagccaccgacgccgataatcaggtctggattcttctcttttaacagtttccagcgacccaactgatggaagactttttcctgagccttctcgcggattgagcaggtgttcagcagcagcacatccgcttcttccgccacgtcggtcagttgatagccgtgggtggcatccagcagatcggccatcttcgatgaatcgtactcgttcatctgacagccccaggttttaatatggagttttttggtcatcgacttgctcttgcgaaatagtagccaggaatgcagggcgcatagtgtaatgctttgctgccgttgtgaccagtatgagcgttatcagcccttaggggtaaaaatcctgtaaacttaaagcatattgctaacaggatgattgaccatgacaaatcaaccaacggaaattgccattgtcggcggaggaatggtcggcggcgcactggcgctggggctggcacagcacggatttgcggtaacggtgatcgagcacgcagaaccagcgccgtttgtcgctgatagccaaccggacgtgcggatctcggcgatcagcgcggcttcggtatcattgcttaaagggttaggggtctgggatgcagtacaggctatgcgttgccatccttaccgcagactggaaacgtgggagtgggaaacggcgcatgtggtgtttgacgccgctgaacttaagctaccgctgcttggctatatggtggaaaacactgtcctgcaacaggcgttgtggcaggcgctggaagcgcatccgaaagtaacgttacgtgtgccaggctcgctgattgcgctgcatcgccatgatgatcttcaggagctggagctgaaaggcggtgaagtgattcgcgcgaagctggtgattggtgccgacggcgcaaattcgcaggtgcggcagatggcgggaattggcgttcatgcatggcagtatgcgcagtcgtgcatgttgattagcgtccagtgcgagaacgatcccggcgacagcacctggcagcaatttactccggacggaccgcgtgcgtttctgccgttgtttgataactgggcatcgctggtgtggtatgactctccggcgcgtattcgccagttgcagaatatgaatatggcacagctccaggcggaaatcgcgaagcatttcccgtcgcgtctgggttacgttacaccgcttgccgctggtgcgtttccgctgacgcgtcgccatgcgttgcagtacgtgcagccagggcttgcgctggtgggcgatgccgcgcataccatccatccgctggcggggcagggagtgaatcttggttatcgtgatgtcgatgccctgattgatgttctggtcaacgcccgcagctacggcgaagcgtgggccagttatcctgtcctcaagcgttaccagatgcggcgcatggcggataacttcattatgcaaagcggtatggatctgttttatgccggattcagcaataatctgccaccactgcgttttatgcgtaatctcgggttaatggcggcggagcgtgctggcgtgttgaaacgtcaggcgctgaaatatgcgttagggttgtagccttacaacattgccggatgcgtgccaaccgtaggtcggataagacgcggcagcgtcgcatccgacattgaaggataagacgtgtcaacatcgcattcgacattgaatgaacgcagaaaagcaaaaagctcgccgaagcgagcttttttaatgtggctggggtacgaggattcgaacctcggaatgccggaatcagaatccggtgccttaccgcttggcgataccccaactgggtgcacttacaaggtaagcgtcttgaataaattggctggggtacgaggattcgaacctcggaatgccggaatcagaatccggtgccttaccgcttggcgataccccaacaaattggttttgaatttgccgaacatattcgatacattcagaatttggtggctacgacgggattcgaacctgtgaccccatcattatgagtgatgtgctctaaccaactgagctacgtagccagattgtttcttcgatggctggggtacctggattcgaaccagggaatgccggtatcaaaaaccggtgccttaccgcttggcgataccccaataaccgggcggtgaaccgcttactcgaagaagatggctggggtacctggattcgaaccagggaatgccggtatcaaaaaccggtgccttaccgcttggcgataccccatccgtacaacgctttctggtgaatggtgcgggaggcgagacttgaactcgcacaccttgcggcgccagaacctaaatctggtgcgtctaccaatttcgccactcccgcaaaaaaagatggtggctacgacgggattcgaacctgtgaccccatcattatgagtgatgtgctctaaccaactgagctacgtagccatcttttttttcgcgataccttatcggcgttgcggggcgcattatgcgtatagagccttgcagcgtcaacctctttttcaaggaaaattgctcgaaagtgactgtttggttaggttgcgaacagcgtggcgctatattcgtcaattattgtttactttgtgttttttcccaccctacagccattcttttgtcatacaggatgaaattcggaatttaacaatagtggtgggaaattaatctatgaaatactggcctacagtgatgagttgtcaaacagtgatgtggcaaacccggaacatttccttactgcatatcagaatcaacaagcacctcaataactgaaacagccccggatttcaccggggctgtttcgcatttcttacttatacgccgactggtgaacaccaaccgcgcgaccagacggatcgtccattttcttgaacgcttcatcccattcgatcgctttagcggaagaacaagcgacggaaggaccgcccggcacgcactcagcggcgctcggaagcgggaatagttcttcaaagatctcccgatacaagtacgcttctttagaggttggcgtgttgtacgggaagcggaagcgggcagtttccagttgctgatcagaaacctgctgcgcagccacttctttcagggtgtcgatccaactgtaaccgacgccatcggagaactgctctttctgccgccaggccacgcttgcaggcagatacgcttcaaaacattcacgcaggatgtgtttttccattttgccgttaccgcacattttatcctgtgggttaatacgcatcgccacatcaaggaattttttgtcgaggaacggaacgcgtgcttccacgccccaggctgacatcgctttgttggcacgcgcgcagtcatacatatgcagggccagcagtttacgcaccgtctcttcatgcagttctttggcattcggtgctttgtggaagtaaagataaccgccgaacacttcatcagaaccttcaccggacagcaccattttaatgcccatcgccttgatcttacgcgacattaaatacatcggtgttgaagcgcgaatagtggtcacatcataagtttcgatgtggtaaatcacgtcgcggatggcatccagaccttcctgtacagtgaagtgaatttcgtgatgcaccgtgcccagatggtttgccacttcctgggctgctttcagatccggtgaacccggcagacctacagcaaaggagtgtaactgcggccaccaggcttcagagcgttcctgatcttccacgcgacgggctgcgtatttcttggtgatagcggaaataattgaggaatccagaccaccagaaagcagcacaccgtaaggcacatcagacatcagatggcttttaactgaatcttccagtgcctgacgcagctcgtttttgtcggtcacgttatctttcaccgcatcgtagtcgaaccagtcgcgatgatagtaagaacggatttcgccgtcctggctccacaaatagctccccgccgggaactctttaatcgtgcggcaaactggcaccagcgctttcatttctgaggccacatacagctgaccgtgttcgtcataccccatatacagtgggatgatccccagatggtcgcgaccaatcaggtaggcatctttttcgctgtcgtacagtgcaaaggcaaacatgccctgcaagtcgtcgagaaattccggccctttttcctgatacagcgcgaggatcacttcacagtcagacccggtctggaactggtaacgatcgccatattcggcgcgcaatgcctggtggttgtagatttcaccgtttaccgccagtacgtgggttttttgttggttgtagagaggttgcgcccccgcgttaacgtcaacaattgacagacgttcgtgggcgagaatggcgttatcgctggcataaataccggaccagtccgggccacgatgacgcatcaggcgtgacagctcgagggctttcttacgcagctcaactgcgtctgttttgatatcgaatacgccaaaaattgaacacataaccttctccgttaacctggtatttgttgcttgttgtgtttgcttgtttaaaaaaatgccgcaaagcagcactgtgcgcaagcgatttggcggtgaaaaaataaaaaacgtaatggtgattgtcgattggtgaaaaaaggtctggtgtgaggatatatttattgatgaatcgataatttttagcgggttttattgaatgtttatattttacgggggccaaattgctgacaaagtgcgatttgttcatgccggatgcggcgtgaacgccttatccggcctacaaaagcatgaaaattcaatatattgcaggagctgcgtaggcctgataagcgtagcgcatcaggcagtttggcgtttgtcatcagagccaaccacgtccgcagacgtggttgctattcagataacgtcgatttcagcgactgacgggtaaatccagctggggcggaaaggcatactgtcgatatcgtcgagcgacgaaacaccagaaagcaccagaatcgtctccagacctgcctggaagccggccagaatatcggtacgcaggttatcgccgacaatcaccgtttcttccgaatgcgcctgcattttgtttaatgctgcgcggatgatccacgggctgggcttaccaacatagaacggtttgcgcccggagattttctcaatccctgcacacaacgcgccacaagcgggataaaaaccgcgcccgtgggtgtccggattggtggcgataaaacgtgcaccgttagcgacgaaataggctgctttatgcatcatgtcccagttgtaggaacgcgtttcgccaacaatcacgaaatcagggttcacatcggtaatagtgaaaccggctttgtacagttcatgaatcagtgcgccttcgcccaccacatacgctttcttgccttcctggcgacgcaggaaatcggcagtcgccatcgcagaggtataaaacacgctgtcaggtacatcgacacctgcggtggcaaagcggttcgccagatcttgcccagtctgcgaaggatagttggtcagcaacaccagcggcaggcctttatccataatcccgtgcaaaaattccgctgcacccggtacggcgacgttatcgtgcatcagcacgccgtcgatatcgcaaattacatttttaatggtcatggactacccagaatattgacaacaataagcgccactataaaagcacattaattttccagcaaatgctggagcaaaataccgttgagcatggcgcgttttaccagcgcaaaagcgccgattgccgagcggtgatccagctcagaacgtaccaccggcagattagtgcgaaacgccttcagcgcctgggtattaatgcagctttcaatagcagggagcagcactttatcggcttcggtgatttcaccggcaataacaattttttgcggattaaataagttgatagcaatggcgatggttttacccagatgacgaccgacatactcaattacttccgacgccagactatcgcctttgttcgcggctttgcagatagttttgatggtgcagtcgtccagcggcacgcggctctggtagccctgctttaacagattcaacacccgttgttcaatggcagcgttggcagcgatagtttccaggcagccaaagttgccgcagtggcagcgttcacccagcggttcgacctgaatatggccaatttcaccgacgttgccgttgcggccaataaaaatgcgcccgttagagataatcccggccccggttccgcgatggacacgcaccagaatggagtcttcgcaatcctgacttgcaccgaagtagtgctccgccagcgccagactacggatatcgtgaccaacgaaacaggtcactttaaaacgttcttccagagcttctaccagcccccagttttctacctgaatatgcggcatgtaatgaattttgccgctgtccgggtcaacaagccctggcaggatcaccgaaatcgcgatcagctcgcgcagtttgcgctggtagctatcaataaactgagcaatggcattcaacagggcatgttccagcgtttgctgggtacgttccggcagcgggtaatgttcttctgccagcactttgctgctgagatcaaacagagtgatggtggcgtcatgacgaccaagccgtacgccgattgcgtggaaattgcgggtttcggtgacgatggagatagcgcggcggcccccggtggaggcctgctgatcaacttctttgatcagcccgcgttcgataagctgacgcgtaattttggttacgctggcgggggcaagctggctttgctcggcaatctgaatccgcgagattggcccgtactggtcaatcaggcgataaaccgccgcgctgttaagctgttttacgagatcaacattacctatctgagcttgtccgcctggtgtcatactttctcttattgagttacgacctcgttaccgttaacgatggtcttggtgattttaaaatcaggtgtgaatgcagtcaggttggctactttacctgcggcgagtgtgccgagacgtttctcaacgccaatcgcacgcgccggatagagcgtcgccatacgtagcacttcatccagtgcgataccgcaatgttcgaccagattacgcacgccttcaatcatggttaaggatgaaccgcttaacgtaccgttctcatccacacaaagtccgttacggtagtatattgttttacccgcaaaaatgaactgttcaatgttggcacctgctggcgcggtggcgtcagtaaccagacacagtttgtcgcctttcagacgtttagcgttgcgaatgttggcgtaatcaacatgcaggccatcagcaataataccgcaataaatgtcagcttcgtcgaggatcgcgcccgccaggccaggttcacgaccggtaatatacggcatcgcgttgtacagatgggtggcaaaggtaatccccgcgcggaaaccggcttttgcttctttcaacgtcgcgttggagtgaccggcagaaaccacaatcccggcatttgccagtttgctgatgacttccgcaggaaccatttccggtgccagggtcactttggtaatgacgtcggcgttttcacacaggaaatcgaccagcgcggcatcaggcttacgcacaaaattcggattatgggtgcctttttttaccagattcagccacggaccttccagatgcagacctaacgcctgattcggatgttttgccaggtactcgcgcataacgcgcacgccctgtttcatcagctcatcgctggtggtgataagcgtcggcagatagttagtacagcctgatttctcattggctttctgcatgatttccagcgtttccacgctgaccgcttcagcggtgtcgttaaactgtacgccgccgcagccgtttaactgcacatcgataaaaccgggggagagaatggccccgttcagtgaacgttgttcgatctctggcggcagttccgctaccggacagacgcttttaatcaggccatcagcgataacaaccgcgtggtcatcaagaaattcgtggccggtaaagatccggccctgggttaatgcatacattctgacccccgattttaaaaaatattgccctgagcaaggagccagggcagggataacaattacagacctttgatattttctgcttctaattcattgaaatatcttaaagtcttaactttcagctccatggtggaaggttcatcgcacaccatgatcgctttcggatgcagttgcagacagctgatggtccacatatggttcacgcaaccttcaacggcggcctgcagcgccagtgctttctggctacccagcaccagaatcatcacttcttcggcatccagcagtgtaccaacaccgacagtcagggcatattttggcacctgattaacatcgttatcaaagaaacgagagtttgcgacgcgagtgtcatgagtcagggttttgatacgagtacgagaagccagagaagacgccggttcgttaaatgcaatatgaccgtcgttacctacaccgcccataaacagatgaatttttccgtaagaacggattttttcttcatactggcggcactcggcgtcgatatccggggcgttgccgttgagaaggttgatgttttctgctggaatatcaacgtgatcgaagaaattacggtgcataaagctgtagtagctttccggatgctctttcggcagaccgacatattcgtccatgttgaaggtgacaacgtgcttaaagctgacctggcctgctttatgcatttcgactaacgctttataggtggtcatcggcgtgccgccagtcggcaggcccagtacaaacggacgatcggcagtcggtttgaacgcattgatacgattgacgatatggcgagcagcccatttgccgacctgttcagcggtagtcagggggatcagtctcattattcacctcaataagtaaaatgtaagccgttggcggattaggcatctttaagcgtaacctggatttgcgcagacaggcgtcaatccgacctgattttttgaatgataaaataagttttctggtttagccagtaaaagggagtgataataacgatatttggtgacaaaactcacaaaagacacgcgtttaatttgcgatacgaattaaattttcacacactctgtagcagatgatctaacaatctgattacagaacatcggcagtacaatttgcagcaaaataaaaatacggcttgaaacgagccaaatagggttctcgtagggggaataagatgaatattttaggttttttccagcgactcggtagggcgttacagctccctatcgcggtgctgccggtggcggcactgttgctgcgattcggtcagccagatttacttaacgttgcgtttattgcccaggcgggcggtgcgatttttgataacctcgcattaatcttcgccatcggtgtggcatccagctggtcgaaagacagcgctggtgcggcggcgctggcgggtgcggtaggttactttgtgttaaccaaagcgatggtgaccatcaacccagaaattaacatgggtgtactggcgggtatcattaccggtctggttggtggcgcagcctataaccgttggtccgatattaaactgccggacttcctgagcttcttcggcggcaaacgctttgtgccgattgccaccggattcttctgcctggtgctggcggccatttttggttacgtctggccgccggtacagcacgctatccatgcaggcggcgagtggatcgtttctgcgggcgcgctgggttccggtatctttggtttcatcaaccgtctgctgatcccaaccggtctgcatcaggtactgaacaccatcgcctggttccagattggtgaattcaccaacgcggcgggtacggttttccacggtgacattaaccgcttctatgccggtgacggcaccgcggggatgttcatgtccggcttcttcccgatcatgatgttcggtctgccgggtgcggcgctggcgatgtacttcgcagcaccgaaagagcgtcgtccgatggttggcggtatgctgctttctgttgctgttactgcgttcctgaccggtgtgactgagccgctggaattcctgttcatgttccttgctccgctgctgtacctcctgcacgcactgctgaccggtatcagcctgtttgtggcaacgctgctgggtatccacgcgggcttctctttctctgcgggggctatcgactacgcgttgatgtataacctgccggccgccagccagaacgtctggatgctgctggtgatgggcgttatcttcttcgctatctacttcgtggtgttcagtttggttatccgcatgttcaacctgaaaacgccgggtcgtgaagataaagaagacgagatcgttactgaagaagccaacagcaacactgaagaaggtctgactcaactggcaaccaactatattgctgcggttggcggcactgacaacctgaaagcgattgacgcctgtatcacccgtctgcgccttacagtggctgactctgcccgcgttaacgatacgatgtgtaaacgtctgggtgcttctggggtagtgaaactgaacaaacagactattcaggtgattgttggcgcgaaagcagaatccatcggcgatgcgatgaagaaagtcgttgcccgtggtccggtagccgctgcgtcagctgaagcaactccggcaactgccgcgcctgtagcaaaaccgcaggctgtaccaaacgcggtatctatcgcggagctggtatcgccgattaccggtgatgtcgtggcactggatcaggttcctgacgaagcattcgccagcaaagcggtgggtgacggtgtggcggtgaaaccgacagataaaatcgtcgtatcaccagccgcagggacaatcgtgaaaatcttcaacaccaaccacgcgttctgcctggaaaccgaaaaaggcgcggagatcgtcgtccatatgggtatcgacaccgtagcgctggaaggtaaaggctttaaacgtctggtggaagagggtgcgcaggtaagcgcagggcaaccgattctggaaatggatctggattacctgaacgctaacgcccgctcgatgattagcccggtggtttgcagcaatatcgacgatttcagtggcttgatcattaaagctcagggccatattgtggcgggtcaaacaccgctgtatgaaatcaaaaagtaatctgctttatgcctgatgcgacgcttgagcgtcgcatccaacaatgacaagcggtggagatcttctctgccgctttttttttcatcaatcatccccataatccttgttagattatcaattttaaaaaactaacagttgtcagcctgtcccgcttataagatcatacgccgttatacgttgtttacgctttgaggaatccacgatgagtgaggcagaagcccgcccgactaactttatccgtcagatcatcgatgaagatctggccagtggtaagcacaccacagtacacacccgtttcccgccggagccgaatggctatctgcatattggccatgcgaaatctatctgcctgaacttcgggatcgcccaggactataaaggccagtgcaacctgcgtttcgacgacactaacccggtaaaagaagatatcgagtatgttgagtcgatcaaaaacgacgtagagtggttaggttttcactggtctggtaacgtccgttactcctccgattattttgatcagctccacgcctatgcgatcgaactgatcaataaaggcctggcgtacgttgatgaactgacgccggaacagatccgcgaataccgcggcaccctgacgcaaccgggtaaaaacagcccgtaccgcgaccgcagcgttgaagagaacctggcgctgttcgaaaaaatgcgtgccggtggttttgaagaaggtaaagcctgcctgcgtgcgaaaatcgacatggcttcaccgtttatcgtgatgcgcgatccggtgctgtaccgtattaaatttgctgaacaccaccagactggcaacaagtggtgcatctacccgatgtacgacttcacccactgcatcagcgatgccctggaaggtattacgcactctctgtgtacgcttgagttccaggacaaccgtcgtctgtacgactgggtactggacaacatcacgattcctgttcacccgcgccagtatgagttctcgcgcctgaatctggaatacaccgtgatgtccaagcgtaagttgaacctgctggtgaccgacaagcacgttgaaggctgggatgacccgcgtatgccgaccatttccggtctgcgtcgtcgtggttacactgcggcttctattcgtgagttctgcaaacgcatcggcgtgaccaagcaggacaacaccattgagatggcgtcgctggaatcctgcatccgtgaagatctcaacgaaaatgcgccgcgcgcaatggcggttatcgatccggtgaaactggttatcgaaaactatcagggcgaaggcgaaatggttaccatgccgaaccatccgaacaaaccggaaatgggcagccgtcaggtgccgtttagcggtgagatttggattgatcgcgccgatttccgcgaagaagctaacaagcagtacaaacgtctggtgctgggtaaagaagtgcgtctgcgtaatgcttatgtgattaaggcagaacgcgtcgagaaagatgccgaaggtaatatcaccaccatcttctgtacttatgacgccgataccttaagcaaagatccggcagatggtcgtaaagtcaaaggtgttattcactgggtgagcgcggcacatgcgctgccggttgaaatccgtttgtatgaccgtctgttcagcgtgcctaacccaggtgctgcggatgatttcctgtcggtgattaacccggaatcgctggtgatcaaacagggctttgctgaaccgtcgctgaaagatgcggttgcgggtaaagcattccagtttgagcgtgaaggttacttctgcctcgatagccgccattctacggcggaaaaaccggtatttaaccgcaccgttgggctgcgtgatacctgggcgaaagtaggcgagtaattttaagtttcgctatgccggatggggcgtttacgtcgcatccggcaaggaacagacaaacagtttcaaacgctaaattgcctgatgcgctacgcttatcaggcctacatgatctctgcaatatattgagtttgcgtgcttttgtaggccggataaggcgttcacgccgcatccggcaagaaacagcaaacaatccaaaacgccgcgttcagcggcgttttttctgcttttcttcgcgaattaattccgcttcgcaatttatccataaaataaatttaaaataacaaaacataattaaataaaatgtaaccgctttcatcttgctggaatttcacgcttttattcttctgcaagcctttcaaccgcaaacttaagccttgtaacaaaaatcatcaaaatatgtgcggttgctcatgttcttacattctggttacagaaagagattgataattcgcgtcgcgaaaaatagtctgttcctgtagtcagcgagacttttctcaacgctacttttttaatttttattttttcgctgttcacctttggtgcagcaatttatacgtcaaagaggattaacccatgcgtacgtttagtggcaaacgtagtacgctggcgctggctatcgccggtgttacagcaatgtcgggctttatggcaatgccggaggctcgcgccgaaggattcatcgacgattcaaccttaaccggcggtatctattactggcagcgtgaacgcgaccgtaaagatgttaccgacggcgacaaatacaaaaccaacctttctcactccacctggaatgccaacctcgattttcagtccggttatgctgctgatatgttcggccttgatattgctgcgtttacggcgattgaaatggcggaaaacggcgacagctcccacccgaacgaaatcgcgttttcaaaaagtaataaagcctatgacgaagactggtccggcgacaaaagcggtataagcctgtataaagctgcggccaaatttaaatacggtccggtttgggcgagggcaggttacattcagccaactggtcaaacgctgttagcgccgcactggagctttatgccaggtacttatcagggggcggaagccggggcgaattttgattacggcgatgctggtgcgttgagtttctcctacatgtggaccaacgaatacaaagcgccgtggcatctggaaatggatgagttttatcagaacgataaaaccaccaaagttgattatctgcactcctttggggcgaaatacgacttcaaaaataacttcgtactggaagcggcatttggtcaggcggaagggtatatcgatcaatattttgccaaagccagctacaaatttgatatcgccggtagcccgttaaccaccagctaccagttctacggtacccgagataaagttgacgatcgcagcgtcaacgacctttatgacggcaccgcctggctgcaagcgttgacctttggttaccgggcggctgacgtagtggatttgcgcctcgaaggcacctgggttaaggctgacggtcagcagggatacttcctgcaacgtatgactccaacctacgcttcctcaaacggtcgcctggatatctggtgggataaccgttctgacttcaacgccaacggcgaaaaagcggtcttcttcggtgcgatgtatgacctgaaaaactggaatcttccaggcttcgccatcggcgcttcctacgtttacgcatgggatgctaaacctgcgacctggcagagcaatccggatgcgtactacgacaaaaaccggactattgaagagtctgcctacagcctggatgcggtctataccattcaggacggtcgcgccaaaggcacgatgttcaaactgcatttcaccgaatacgacaaccactccgacatcccaagctggggcggtggttacggcaacatcttccaggatgagcgtgacgtgaaatttatggtaatcgcaccattcaccatcttctgatgcccgacgcggcaggttttgtgcctgccgcacgtttgaggaatttgctatgaaaaaactgattctcatcgccataatggcatcggggctggtagcttgtgcgcaatcaaccgcgccacaggaagacagtcgtctgaaagaggcatacagcgcctgtatcaacaccgcacaaggttcgccagaaaaaattgaagcctgccagagcgtgttaaacgtgctgaagaaagagaaacaacatcagcagtttgccgaccaggaaagtgtacgcgtactggattatcagcagtgtctgcgtgcaacgcaaaccggaaatgatcaggcggtgaaagccgattgtgataaagtctggcaggaaatacgcagtaataacaaataagtgagagctgtaactctcgcttttcttatttcccttgcataaaaaagccaacccgcaggttggcttttctcgttcaggctggcttatttgccttcgtgcgcatgttcatcttcgcggcaatcgccttcggcacagtgaccgtaaagatagagactgtggttagtcaggcgaatgccatgttttgcggcaatttcacgctgacgcgcttcgatggaatcatcactaaattcgataaccttgccgcagtcgaggcagatcaggtgatcgtggtgatgttgctgtgtcagttcaaatacggatttaccgccttcaaaattgtggcgggtgacgataccagcgtcgtcaaactggttcagtacgcgatataccgtagccagaccaatttcttcacccatatcgatcagacgtttgtataaatcttccgcactgacgtgatggttgtccggctcctgaagaacttccaggatttttaaacgaggaagcgttactttcaggccagctttctttagggcggtattgttatcagtcatgcggaatctgtcctgttactaagcggttcacttcattagaagaagtgacagaatttgctcttgagataatgcgtatcattatagaattgccacgcctaaatgaaaaccacaagtccctggcaaatattgttaataaaaacgtggcacagcttacatttacaacggcaaggccacttgaacaccgggacattgtacaggtacaacagcaaaagttacaaatttgtagcaattattttgattggcattatctattaatacggcgtagacatgagtctacgccgcatcacatcaggcattgagaatttcgtcgagatgcaactcttcagaaatctgtttaacccatttttctacacgttcagcggtcagttccggctgacggtcttcgtcgatagccagaccgacaaagtggtcgtcatctgccagaccttttgatgcttcgaaatgatagcccgcagttggccagtgaccaacgatggttgcaccgcgcggttcaatgatgtcgcggatggtgcccaatgcgtcgcagaaatattcggcgtaatcttcctggtcaccacaaccaaacagcgcaaccagtttgccgttgaaatcaatctcttcgagagtcgggaagaagtcatcccagtcacactgcgcttcgccgtaataccaggttgggatgcccagcagcagaatgtcataagcttccagatcttctttgctgctttttgcaatgtcatggacatcggcaacgtctttaccaagctgtttttgaatcatttttgcgatattttcggtattaccggtgtcgctgccgaaaaagatgccagtgatagccatgagtgaaataacctcttgaaacttattgaaatgggggtggaaaattgcccacggataaaggcaatcatagcagaacaggcagtcttgcggaatcagcaaacgagcaggactgcacactgtgctacatgaaagtggaaatttaaacgatgccctgactacgcagcgccgccagttgctgcattaacatctcttcgatcagttcgctacggctcatattgcgcgactccgccagctcgttcagcgcctcgacagcttccgcgttcagcttcagttcgacacgcttaaggccacgtactttgtcgcgttttagctggttgcgtttattaatacgcagctgttcatcgcgcgaaagcggattagttttcggtcgtcccggtcgacgctcgtgcgcgaacagatctaatgtcgtacggtccgtttgttctttggccatgatcttggtgacttcgggggaaacaatcagccaggcctctgcccggatggatagcgcgccataatacatcagcgcgatgagtcacgccaacgcccacgcgcggaaagcgacgcggacgctgggtttttaatcagttgcgttaatcattgagatagcgacggatagcgcgtaataccgcatccggtttttcagcatggacccagtgacccgcgcctgcaatcacatgcgcccgtgcctgtggaaattgagccagtaaatcatcacggtactgctcgctaacatacggagaattgccgccagggataaacagggcagggtgatcccatgccgggattttctcccaacctacaatatgcggatactgatcccacaataccggcacgttaaagcgccactccccgtcaacaaaagatttcagcagaaactgaatcaccccttcttcattaagatgctggcgcattattgctgctgcttgctggcgagtttgtgcgtccgattcactgaccgcgttgatagccgcaaaaatctcatcatgacggcgtacgtgatagtcgaccggcgcgatatcgatcgccaccagtttatcgatgcgatcggaggctagtgcagtaagtgccattaccgctttaccgcccatggagtgaccgataaatgttgctttgtcgatctgctgtgcatccagagtatcaacaagatcctgcgccatcgccgggtaattcattaccggatctctcggtgaaagaccgtggttacgcatatcaacctggatgatattgtgatcgtttaccagatcgcgagccagtacgccaaggttgtcgaggctgccaaacagaccgtggacaagaacgatgggagaattattgtgctggttttgtgcagtttgcgcgcggatattcaatttcatggcaaagttctttttttcgcgttgtcgggttagggtattatgttgaccattgtgccacagggctgcaacaaataaggtttattccgagtttttctgcaagccaggcttgacgctatccgctgccgggatttattcatatactcctggcgacttgtattcagctaagacactgcactggattaagatgaaaacgattgaagttgatgatgaactctacagctatattgccagccacactaagcatatcggcgagagcgcatccgacattttacggcgtatgttgaaattttccgccgcatcacagcctgctgctccggtgacgaaagaggttcgcgttgcgtcacctgctatcgtcgaagcgaagccggtcaaaacgattaaagacaaggttcgcgcaatgcgtgaacttctgctttcggatgaatacgcagagcaaaagcgagcggtcaatcgctttatgctgctgttgtctacactatattctcttgacgcccaggcgtttgccgaagcaacggaatcgttgcacggtcgtacacgcgtttactttgcggcagatgaacaaacgctgctgaaaaatggtaatcagaccaagccgaaacatgtgccaggcacgccgtattgggtgatcaccaacaccaacaccggccgtaaatgcagcatgatcgaacacatcatgcagtcgatgcaattcccggcggaattgattgagaaggtttgcggaactatctaaaacgttgcagacaaaggacaaagcaatggcaatccacaatcgtgcaggccaacctgcacaacagagtgatttgattaacgtcgcccaactgacggcgcaatattatgtactgaaaccagaagcagggaatgcggagcacgcggtgaaattcggtacttccggtcaccgtggcagtgcagcgcgccacagctttaacgagccgcacattctggcgatcgctcaggcaattgctgaagaacgtgcgaaaaacggcatcactggcccttgctatgtgggtaaagatactcacgccctgtccgaacctgcattcatttccgttctggaagtgctggcagcgaacggcgttgatgtcattgtgcaggaaaacaatggcttcaccccgacgcctgccgtttccaatgccatcctggttcacaataaaaaaggtggcccgctggcagacggtatcgtgattacaccgtcccataacccgccggaagatggtggaatcaaatacaatccgccaaatggtggcccggctgataccaacgtcactaaagtggtggaagacagggccaacgcactgctggccgatggcctgaaaggcgtgaagcgtatctccctcgacgaagcgatggcatccggtcatgtgaaagagcaggatctggtgcagccgttcgtggaaggtctggccgatatcgttgatatggccgcgattcagaaagcgggcctgacgctgggcgttgatccgctgggcggttccggtatcgaatactggaagcgtattggcgagtattacaacctcaacctgactatcgttaacgatcaggtcgatcaaaccttccgctttatgcaccttgataaagacggcgcgatccgtatggactgctcctccgagtgtgcgatggcgggcctgctggcactgcgtgataagttcgatctggcgtttgctaacgacccggattatgaccgtcacggtatcgtcactccggcaggtttgatgaatccgaaccactacctggcggtggcaatcaattacctgttccagcatcgtccgcagtggggcaaagatgttgccgtcggtaaaacgctggtttcatctgcgatgatcgaccgtgtggtcaacgacttgggccgtaaactggtagaagtcccggtaggtttcaaatggtttgtcgatggtctgttcgacggcagcttcggctttggcggcgaagagagtgcaggggcttccttcctgcgtttcgacggcacgccgtggtccaccgacaaagacggcatcatcatgtgtctgctggcggcggaaatcaccgctgtcaccggtaagaacccgcaggaacactacaacgaactggcaaaacgctttggtgcgccgagctacaaccgtttgcaggcagctgcgacttccgcacaaaaagcggcgctgtctaagctgtctccggaaatggtgagcgccagcaccctggcaggtgacccgatcaccgcgcgcctgactgctgctccgggcaacggtgcttctattggcggtctgaaagtgatgactgacaacggctggttcgccgcgcgtccgtcaggcacggaagacgcatataagatctactgcgaaagcttcctcggtgaagaacatcgcaagcagattgagaaagaagcggttgagattgttagcgaagttctgaaaaacgcgtaaacacatttaataaaaaaagggcggtcgcaagatcgcccttttttacgtatgacaaacacagaattgcctgatgcgctacgcttatcaggcctacgaggatggtgcaatatattgaatttaagcgattttgtaggccggataaggcgttcacgccgcatccggcaaaaacaacgaacactttgtcaacaaactgagtagctcaaggaaatcccaatgaagaccaacaggagtctggtcgtcatagtgtcactaattaccgccacattactgctgactgcatgcgcccaacctgaacaatcatcattagctggcgactggttactgacccctaaagataaaaccagaggattaacgggtagcattgcggtaaatattgcacctttccggtgtaagacaaattgccgtggtgataacttacctgataatacccgccgctggcagttgtcaggcgggaacgaaaaagaacttacttatcttcataatatgtcagcacaagaaaaggtcggtttaaatcccggttggcaatgctacacctcattttttatgcgggtttgccagggcaagcccggcactcgaccgatagtcaatgaggattatgtcagcgaaagcggattttttggctcgatgatgcatgtcgggattattgagttacgacgctgccagtcagaaaattgccagcaagaattgaaagcgataaatacacattaaaatagtgagtccgggaatgaaacccggacctgaacatgtcttattgcgtgaatgtttctttcatttgatactgcatttcccagagttcagtaagcgaaataacttttcttgttcttgcttcttcactttgtacccataagaaagggtagaacgtgaaggcttccgttgccgataattttattacgtcttctcgccattgctgccatcgtacattttcatagaaggtatctaaatcaccggataatgcccactgaagaaactcagaatatccaacttccagactttcccaattcagcgtatctggcgcaaaataataaacgcagccagtatcttccccaagatcgccaccattaagagcaaaaattacccctgcgacatcgtcagcgatgggtaaagcccgcacgcctgcgaattcagggcgttgtgtccaacttactggatctcgtggcaaccgggggtgaccagatcctgctatgcgtaactaaccattatcaatcagcagacctccggagccatagacaagcgcacccatcggtgattttgttgtcacctgtaattgataaagtgcggtttcggctaaatctttattaaccggtaagagttcggtatggtttgtggcgtcttttaaccagttctggattattggccaggctgaatcttcagtatttactaactgattcatttcacgcatcgctacttgctccttgtgtgctacggtgtcatttatgatgaggaattgtatggaacattttttaaatattaagttccttatatttgaataaaaaatgactttatccatacattgccacttttttcaaagcataaaccgatacccaataccggtttcagtaataaaatggcgaggccgggccggatcctgttccagtttttgtcgcagatgccccatataattacgcaaatagttgctgtgttcgatcgcgtttagaccctacatctgccggatgcggcataaataacgaactatttgccaacaaacagaaagggcgatcattcaatcgcccttttttactttgttttattaaccgtgtttatttttcagttcaaagcgtggtgataccagaccatacagtgtccaaccaaggaaggtcacgatggaaccgtacagcatggcttcttccccggatgagtacagcgcataaaagctatacatcgcgccaacaaaagcaacaaagtttgcaactttcgcttttgaggggggcacattagcgaccttctgaataatgactaatgccgccattgacagaatatacggaatgatattggtcaccacggccaggttaaccagcacgttgaactgactgtttagcgacgggctaatggtcatcagtgccaatccactctgaataatcacaatggtcaacattccctgcaccggtgcatccactttggttacacgggagaaaattttagggaagtagccttcatcagatgaagatttaaacacctgggcaatggtgaactgccagccaagtagcgaaccgcagcaggacatcaccatcagcgccataatgactttacccacttccggcgtgaacatctgcgcgaaggccagaccaaatggtgccgttgaatttgccagctccatatttggcacaatcccggcaatcacgttggtggagacgatataaatcaccgccgcacctaacgtaccgccgagtaccgcgattggcacattacgttccgggttttccactacatcagtattcgcacacgcagactccagaccaagaaaagcccacagcgtcatagcgatggaagaacctaccgcactgaagaacggtgcatgatgcggattccaggaatcaacgtacagcgtcgggctaaaccagaaccagccaataatgcacagaccgacgaccggaataatgaccccccacacggtaatgctactgatttgcccggtaatgcgcgcaccaccaaagttagccacggtacaaatccacagcaccccgatggtcgcaagaccaatctgcactggcgacaaactcgcgccgagcagttcggtgccgtaaccaaccgccgaaatagcaatcgcgacgttagcaatcagcagtgagacgccgtaggtatagttcgccataaagttaccggatttaccgaaagcatactcggcataaccgcccataccgcctgatttacggctgaacataccgcattttgcgaatgcccatgccagtgccattgagcctacggctgtcaccagccaggagataattgagattgtcccgacttcggcaagctttgtcggcagcatgatgataccggagcccatcatgttgaccatcgtcagtatggttaactgaacgacgcccattttgttcgatttagcctgactcataatttttcccctttcaacagggtgctttgcgcatcacgaggcttgatgacatagcaccaaacttgcttacgaccatcatgttcttcgatatagacaccctgcagctccggtgcaaaacctggcagcaggttgatcccttcttccagagcgctgaagtaacgcagaacagcaccaccccagatttcacccggaacaacacacagcacacccggaggataaggaagcgcaccttcggcagcgatacggccttctgcatccggcagacgaaccagttccacttcaccgcgtaaataggcgtagttggcttcttgcggattcatgctgacgcgtgggaagtgctccttacggaacatctctttttgcagttgtttcacgttgtggcgggcatacaaatcatgcatttcctgacacaactgacgcagggtataaccggcgtagcgctcttcatgctgtttgtagatggaaggtagcacttctgctaatggcgcgtcggactcaagcagtttttcgaagcgtaccagcagggcaacaagttgctgaagtttggccatatcttctgccggagtcagcaggaagaggatggagttaagatcgcatttttccggcactacgccattttcgcgcaggaagttagcaagaatcgtcgcgggtacaccgaacgcttcatattcgccgttacgtgcatcaatacctggggttgtcagcaacagtttgcatggatcgacaaagtattgattctctgcatagccttcaaaagaatgccagtgttcccctggtacaaactggaagaagcgcagatcaaccgcaatttgcgctgtttcatacgactgccagggtttaccatccaccagttcaggtacgaacggacgaatatgctgacagttatcgaggatcagtttgcgggcattaatgccatttaccacacaatccatccacatattacgaccgctgacaccttcatgcattttggcgttgatattcagtgcggcaaacagcggatagaacgggctggtggaggcgtgcatcataaaggcgttgttcatgcgtttgtgcggtacataacgctgttgccctttgatgtggctgtcttttttatgaatttgtgaagtctgagaaaaaccagcctgttgtttatgcacagattgcgtaaccagaatacccggatcgttctcattaagatccagcaacagcggcgaacagtccgccatcatcggaataaactgttcatagccgacccatgctgagtcaaacaggatgtagtcacacagatgaccaattttatccaccacttggcgggcgttataaatcgtaccgtcgtaggtgcctaactgaatcacagcgaggcggaaaggacgagcctcttttgcccgctgcggtgcgacttccgcgatcagctcacgcaggtaactttcttcaaaacagtgcgcatcaatgccaccgataaagccatacgggttacgtgccgtttccagataaaccggtgttgcaccagcctgtagcaacgctccgtggtggttagatttgtggttattgcgatcaaacagcaccagatcacccggtgttagcagggcgtttaaaaccactttgttagaagatgaagtgccatttaaaacgaagtaggttttatcggcattaaacacttttgccgcatgttgctgtgcaatgcatggcgcgccttcgtgaatcagcagatcgcccatcgctacgtcggcgttgcacaagtcggcacggaacagcgcctcaccaaagtattccacaaactgattccccgccggatggcgacggaaaaattcgccgccctgatgaccagggcaatcaaacgcgctgttaccttgattgacataatcgaccagtgcgcggaagaaaggtgggcgcagttgagtttcataatggctggcagcggtttctaactggcgaccataaaattctcgtcgcgattcgcaattctcaaagacacccgaaatacggggcaaatactctgcgggtacacgttcttgattttcagtagcaataaataccgggatgccataacccgtggcatcgatttcatcgagttttccgcatgtaacatcgttgagcgataaaactattgccgccacatcgatattacgactttcattaatgtagatacattctcgctgcgtggtaaaacagtccgggcaagaatcactaaccgcaatttttaattttgacatttttcatctctttattttaggtaatagcaggtcctcaatttctcgaatgagaaatcgatcgtgccggaaaaaagcaaagttaccccgctgataaataaatcaggtagattgcttttttcagaatgcagaaacccttaccagtcaggtggctgataatacaagggttaacagagaatgagcactgcggaatacaggcatatgcctgtaatacagagagtcaggaagacctgtacgctgaagtgcccttagtcggtagactaacgggcattgaagaagtgaaagtcgaagctattgcgatgagcaaacttcataatatgagttgtccgccttatatggggcatagtgcggctgttattttccatttaatttacctttcctgatgtgaatgaaggtgaagatattctatccaggaaatacggttgaactgtgaaggtgatcaataaaaaatgatcaatcttaatttatttaatgatgagctttttactcagtaatataaaatattgaattgttatttttgtgtgttgtttaagataaaaagccgtatttattattacggctttaattaataaaaggcaggctgtattaaaattaatattcaaagcataaaccgatagccaataccggtttcagtaatgaaatggcgtgggcgggcgggatcctgttccagtttttgtcgcagatgtcccatataaatacgcaaatagtgactgtgttcgaccgcgtttggcccccacacctggttaaggagctggcgctgggtgagtacttttccggcattgttgagcagcaccgccagcaggcggaactcaattggtgtgagatgcacctcttcctcaccccggtgaatcacgcgggcggctaaatcgacggtaacatcggaaaattttaccagcggatcgggcgcggtggtggcagagtggcggcgtaatgcgacgcgcagacgggcctgcaattcgccaatgccaaacggcttactcagataatcatccgctccggcatccagcgcggcgattttgtcgctctcttcgctgcgtgcggaaagcacaatcaccggcaccgcgctccactggcgcaggtcgcggataaactcaatcccatcaccatcgggcaggccgagatcgagaataatcaaatctggcttacgggttgccgcttccagcaagccgcgttgcagcgtttcggcctcaaagacgcgcatcccgtcgccctccagcgccgtgcgcagaaagcgacgaatagcctgttcatcttcaacaatcagaacgtttgtcacatatcctcatgaaattcttcaagttcaggggcagtttgctggggaagtgtaacacgaaaacaggcaccaccttccggtcggttgaacgcggtaatagtgcccccgtgtacatccactatcgcccgacaaattgccagtccaagccctacccccggtactgccgactctttattcccgcgagcaaacttatcaaatatcgtctgctcctggcctggcggaagaccggggccgttatcccagacatccagttgtagattttcgccctcaacgtgggcatcgataccaatttcggcctgcgcacccgcatatttcaccgcgttctccagcagattaatcagcacccgttcaaagagtggcccgtcaacgtggattaaggtcagcggttctggcagagaaagattgatgggcgacgataaacccggttccagcatttgcagcgcgctgccgactacttcttccagcgttaaccactctttcttcaaattaaagccgccggactgaattcgcgccatatccagtagattattcaccagtcgggtagtgttcagcacatgctgacggatctcgctggcctggcgggcgtggggtgatccttcgcttgccagatcgagcgttaagatttctgcctgaccaaacagcaccgtaagcggcgtgcgtaaatcatgcgaaagcgccgccagcagggcgttgcggatctgttcacgttcgcttgccatccgcgcctgttcttcgctggcggttagcgtcagccgctcaagggcattggcgactaacagcgtaaacgtctccagcaggcgctgctgttccgggatcatcaactggcgcagattccccggctccaccaccaccagcccgtaggttttctcgccgctttttagcggcaaaatctggtacggtacaccgggtaacgtgtcggtgcccgcgcccgcaggcaggcctttatcaaaactccactgcgcgatggcatcgtcccacggcgtcattccttgcggatgtgttaacggctgcaatttaccgttgtcatcgggcaacaacacctgactgcgggcatgaaacgtggaggcaataaattgttcgctggtggcagcgatatcctgcggactgcggcccaccgccagagctttcgacatttcatataagtgccgtgtgcgttgctcgcggtaacgggctacccgcgcctgataacgcacgccagcagtaaggttcccgatcaccagcccgacggttaacatcaccgcgaaggtcagcagatattgcacatcagagacggcgagcgtgccgcgtggggcgataaaaaagagatcgaaactcactacattaatgacggtggcaaccactgaaggccagcgtccataaaatagcgccaccaccaccacgccaagcagatacagcatcaccaggttggcggcatcaaacgccatcagccactgcatggcaattaaggtgataacggcgcataacgcggcggcaaccacgcatccctgaatttgtacacgccacttgtctttaaaagagcggttatccggcgcgttgttaatcgtgcgggcgggtggttcatcaagcgcgaccagcacctgatcgagatcgggggcgatgcgcgccagtcggtcagcaaacgtttcccgacgccaccagcggcgcgaggccgggcgaccgagaataatcttgccgagattatgttcacgggcataacgcactaccgctttctcttccgctggatcagaaagtgttgccgtctccgcgcccagttcctgcgccagacgtaaggcgctgagaattgcccgacgttttttttccggtaagcggtgcagggcaggggtttcaacatacaccgcgtgccagacgctacccagccgtgacgccagccgcgccgctgcgcggaccagtttttcgctgccggtgttatggccgatgcataaaaggatcgcgtcgcgcgtgtgccacactttctcttcgccaggatgcccccgccaggcgcgcatttgctcatcaacgcgatcggcagtacggcgcagtgccagttcgcgcagggcgatcagattacctttgcggaaaaaatgttcaatggcgcgctccgcctgcccggcaatatagactttgccttctttcagccgctggcgcagatcgtccgggggcaagtccaccagcaccacgtcgtcggcggcatcgaaaaaaggatcgggcacggtttcccgtacctgaattccggtgacgccgctgaccacatcattcagactttccagatgctgaacgttgacggtagtgaaaacatcaatgccagcttccagcagttcttcgatatcctgccagcgtttgggatgacgggaacctggcgcattactgtgcgccagttcgtccattaagatcagcgccgggcggcgggcgagggcggcatcgagatcaaactcgctgatatgccgcccacggtacgcctggcgttttaacggcagaacagccagcccttccagcatggcggcggtatcttttcgcccgtgggtttctaccacgccaaccacaatatccagcccttgcgcccgcagtcgctgggcttctgccagcatcgcccaggtcttcccgacgcctgcacaggcaccgaagaaaactttcagcttcccccgatgcggcgcggcagtttgttccagcagacgatcggggtcgggacgtaagggttcgttattcatcaagtttatccagcgccagattgagttcaacaatgttgacaaccggctggccgatatatttcaccagcggttgttggctgtattttgcgatcagttgcgtgagctgttcaacgctgagattacgcgctttcgccacgcgtgggatttgccaggccgccgcttgcggggtgatattattgtccagcccgcttgccgatgccgtcaccagttcaaccggaacgctcgcgctggcatccgggttagcggcccgtaatgcagcaacgcgtgcggctattagtttatccagctcagggttactgaccgccagattgctcccgccagaagcctgtggattatagggcatttctgccgttgccgacgggcgaccatgaaaatagccgttgccggtaaaattctgcccgattaatgccgaaccgcgcaccgtatcaccttcacgaatcaacgaaccattggcctgccagggaaaccaccattgccccagtacggtggtcagcagcgggtaaacgccgccagtaatcaataacagaaagataaatgttgataatgccggacgtaatccactcatggtaaacctcacaccagaccgcaaacggtcagcagtaaatcaatgactttgataccgataaacggcaccagcagcccacccagaccgtaaatccataagttacggcgcaacatggcagaagcggtaagcggtttataactcacgccttttaacgccaggggaatcaaaaagacgataatcaaggcgttgaaaatcaccgcactgaggattgcggagtcgggcgaatgcaggcacatgatgttcagcgcatttaactgcggatacgttgccgcgaatgccgccggaataatggcgaagtatttcgccacatcgttggcaatgctgaaggtggtcagcgagccacgggtcatcagcatctgtttgccaatgtgcaccacctcgatcaacttggtcgggttagagtcgagatcgaccatattgcccgcctctttcgccgcctgggtgccggagttcatcgccaccgcgacatctgcctgcgccagcgccggagcatcgttggtgccgtcgccggtcatcgctaccaaacgaccttccgcctgatactgacggatcaatgccagcttggcctccggtgtcgcttcggcgagaaaatcatcgacacccgcttccgcagcaatcgcggcggcagtcagacggttatcgccggtaatcatcaccgttttaatgcccattttgcgcagctgggcgaagcgctctttaataccgcctttgacgatatctttcagcgcaataacgcccagcacacgagaaccttccaccaccaccagcggcgtggctccctgacgcgcaacctgatcgactttttgatcaacatcggtagggaagtgaccaccgttagcctcaacatggcgacgaatggcatcgacagaacctttacggatcatgcggttgtcgatgttgatcccgctcatccggctttgcgcagtaaacggtacaaaggtggcatggagcgactgcacatcgcgctcgcgcaggttaaaacgctgcttggcgaggatcacaatactgcggccttccggcgtttcatcagccagcgaagccagttgtgcggcgtcagccagcgttttttcatccacgccctgcgcggggataaactccgacgcctgacggttaccgagtgtgatggtgccggttttatccagtagcagaacgtcaacgtcacctgccgcttcaactgcacgtccgctggtggcaatcacattcgcgcctagcatccggctcatcccggcgacgccgatcgctgacaacaggccgccaatagtggttgggatcagacagaccagcagcgccaccagtaccgttacgctgactgcattaccgccccacgcggaaaacggccacagcgtggcggttgccagtaaaaagacgatagtcagggcaatcagcagaatggtcagggcaatttcgttcggcgttttgcgtcgctgtgcgccttccaccatcgcgatcatccgatccagaaatgtctcgccggggttaacgctacactcaatcaccagccagtcagaaagaatacgcgtgccgccggtgacggaggcaaaatcgccgccggattcacggatcaccggtgccgattccccggtgatggcgctttcatcgaccgatgcacccccttcaataacttcaccatcgcaggggataatatcgccagcttctaccagtacgatatcgcctttacgaagttggtcggcaggaactttgtccgccgcagcgccatatttcggctcacgcagcttgcgggcaaaggcagtttttttcacccctttcagactgttggcctgcgctttactgcggccttctgccagcgcctcggcgaaattagcgaacagtacggtgatccacagccaaccgctaatggccgcgctaaacagcgcattgccgggcatcgcaccgcttgccatcgcgatgctaatacaggtggtcagcagactgccgatccagacgataaacatcaccggattgcgccattgcgcctgcgggtttaattttttcaccgcttctttcagcgcctgaacgacaagtgttggttcgaatagcgccagttgtttacgactcatattcagtgctcactcaatatcatcaggagagatattccgccaccggaccaagcgccagggcagggataaaggtcagtgcgccaaccagcaacacggtgccgattaacaggccaacaaacagcgggccgtgcgttggcagcgtgccggagctggcggcttggctctttttactcaccagcgaaccggcaattgccatcaccgggataatcaccccgaagcgaccgacaaacatgcagaacgccagtaaacagttccagaacggagagttggcgcttaatccggcaaaggcgctgccgttgttgttagcggcggatgacacggcgtacagcacttcgctaaaaccatgcgggccagggttgagcatggcgctacgtccggcgtcggtcatcatcgccaacgccgcgcccatcagcaccagcgtcggggtaaccagaattgccagtgcagtcagtttcatctcgcgtacgtcgatttttttacccagatattccggtgtacgaccaatcatcagcccggcaataaacaccgccagcaggacaaacagcatcatgccgtaaagaccagaaccgacaccgccgaacaccacttcaccaatttgcatcagccacatcggcaccatgccaccgagagcggtaaacgaatcatgcatcgcaatcaccgcgccacaggaagccgccgtcgtcacgaccgcaaacaggctactgaccagcacgccgaaacggctctctttaccttccatattgatgctgctgtccgtgcccagtgccagcagatgaggattaccctgaacttctgcccacatcaccacgcctacgcagatgacaaaaatcactgacatcgcccacagcaacatgcgcccctggcggcgatcgcccatcacttcaccaaaggcaaagcacagcgccgttgggatcaagaagatcgccagcatctgcacgaagttggtcagtgcggttgggttttcaaacggatgcgacgagttggcattaaagaagccaccgccgttagtaccgagcatcttgatcgcttcctgagaagctacaggccccatgggtaacagctgttgcgctccttcaacggtattcacagcctgataaggcagaaagttttgcagcgcaccttgttgaataaaaaacagtgcaatcaacaacgccacagggactagcacccataacgtgatgcgtagcagatcgacccaggcattcccgagcgtgctcatgctctggcgggtaaacgcacggatgagggcaaaaatcaccgcaatcccgctggcggcagaaagaaagttttgcaccgttaagcccgccatctggctgaaatagctcaacgtggtttcaccgctataagattgccagttggtattggtgacaaagctgacggcggtattcagcgccagatcccacgacagccctggcaactgctgtggattaagcggcagatagtgctgaccgagcaacataaaaaacagcaccgccagccccagcatgttcaggccgagaatggcacaaagatattgcttccagttcatctcacggtcagagacgccaagtgcgcgaaaaagtacgcgctcaacgcccgttgtaccgggaagaggaatgtcattaatcagccgcgccagcccgctgcctaaaggacgcgccagcaccattaacaccagtaaaaacgtggcgatcagtaagaacccttgcgcagccatcagaacgcctccgcattgatcagggcataaaccagataacccagtaataaaaacaccagcaatacgccggttatcacgcctgcactcacagtgcacctccagtggcctaaaagtgataccggaagggtagaattctggctgcaaagatttcgcaaaaatctgcgggcggggtgtaaaaaaagtataaaaatggcaaaagccatgatttaactaatgtttagtattaatttaacttttgtgtaacttaattacaggatgaatgtaaataaaccatcaataagcaaaaataagtggtcggatgagtagtaaaattacacaaaaggcggtactattttcatcagataaacaaattcatttttccggtgccattcaccgggtagatacaaaagggggagaaaagtatggaactctacagagaatatcctgcatggcttatctttttacgccgtacttatgcggttgcagcgggcgttctggcgctgcctttcatgcttttctggaaagaccgcgcccgcttttacagctacctgcatcgcgtctggtcgaaaaccagcgataaaccggtgtggatggatcaggccgaaaaggcaactggtgatttttattgattgctgagttttgaatacattgaaaaccgccagcggaaacgctggcggttttttgtatcaggaagatgttcagaggaatatttagacatcgttataccaatcgaaacatatattcatgaaatatatataaatattttcctaattgttcttatctgacagatatctcacttaaggctttcttataaatctgtagggtttcgcctgtcagcagacaaataacccgataaaacaaggatgagcagatgagcggaaaaccggcggcgcgtcagggcgacatgacgcagtatggcggtagcattgtccagggttcagccggggtacgcatcggtgcccccaccggcgtggcctgttcggtgtgccccggcggggtgacgtccggccatccggtcaatccgctgctcggtgcaaaggtccttcccggtgaaaccgacatcgccctgcccggcccgctgccgttcattctctcccgcacctacagcagttaccggacaaaaacgcccgcgccggtggggagcctcggccccggctggaaaatgcctgcggatatccgcttacagctgcgcgataacacactgatactcagtgataacggcggcagaagcctgtattttgagcacctgtttcccggtgaggacggttacagccgcagcgagtcactgtggctggtgcgcggcggcgtggcgaaactggatgaaggtcaccggctggccgcactctggcaggcgctgccggaagaactccgcttaagtccgcatcgttatctggcgacaaacagtccgcaggggccgtggtggctgctcggctggtgtgagcgggtgccggaagcggatgaggtgctgcctgcgccgctgccgccgtaccgggtactgaccgggctggtggaccgcttcgggcgcacacagacgttccaccgcgaagccgccggtgaattcagcggcgaaatcaccggcgtgacggatggtgccgggcgtcacttccggctggtactgaccacgcaggcgcagcgggcagaagaagcccggcagcaggccatttccggcgggacggaaccgtccgcttttcctgataccctgccgggttacaccgaatatggccgggacaacggcatccgtctgtctgccgtgtggctgacgcacgacccggaatacccggagaatttacctgccgcgccgctggtgcgctatggctggacgccccgcggcgaactggcggcggtgtatgaccgcagcaatacacaggtgcgcagctttacttacgatgataaataccggggccggatggtggcgcaccgtcacacgggccgaccggaaatctgttaccgttacgacagcgacgggcgggtgacagaacagctaaacccggcaggcttaagttacacgtatcagtatgagaaggaccgcatcaccatcaccgacagcctgaaccgccgtgaagtcctgcacacgcagggtgaaggcgggctgaagcgggtggtgaaaaaggaacacgcggacggcagcgtcacgcagagtcagtttgacgcggtgggcaggctcagggcacagacggatgccgcaggcaggacaacagaatacagtccggatgtggtgacgggcctcatcacgcgcatcaccacgccggatggcagggcatcggcgttttactataaccaccacagccagttaacgtcagccaccgggcctgacgggctggaaatacgccgggaatatgatgaatggggccgtctgattcaggaaactgcccctgacggcgatatcacccgctaccgttatgataatccacacagtgacttaccctgcgcaacggaagatgccaccggcagccggaaaaccatgacgtggagccgttacggtcagttgctgagcttcactgactgttccggttatgtaacccgctatgaccatgaccgttttggtcaggtgacggcggtgcaccgcgaggaagggctgagtcagtaccgcgcatacgacagccgtggacagttaattgccgtgaaagacacgcagggccatgaaacgcggtatgaatacaacgccgccggtgacctgaccaccgtcattgccccggacggcagcagaaacgggacacagtacgatgcgtggggaaaagccatctgtaccacgcagggcggtctgacgcgcagtatggaatacgatgctgccggacgggtcatccgcctgaccagtgaaaacggcagccacaccaccttccgttacgatgtactcgaccggctgatacaggaaaccggctttgacggccgcacacagcgttatcaccacgacctgaccggcaaacttatccgcagcgaggatgaggggctggtcacccactggcactatgacgaagcagaccgcctcacgcaccgcaccgtgaatggcgaaaccgcagagcggtggcagtatgacgaacgcggctggctgacagacatcagccatatcagcgaagggcaccgggtgacggtgcactatggttatgacagtaaaggccgcctcgccagtgaacacctgacggtgcatcatccgcagacgaatgaactgctctggcagcatgagaccagacatgcgtacaacgcacagggactggcgaaccgctgtataccggacagcctgcccgccgtggaatggctgacctacggcagcggctggctgtcaggcatgaaactcggcgacacaccgctggtggagtacacccgcgaccgcctgcaccgggaaacgctgcgcagcttcggccgttatgaactcaccaccgcttatacccctgccgggcagttacagagccagcacctgaacagcctgctgtctgaccgcgattacacctggaacgacaacggcgaactcatccgcatcagcagcccgcgccagacccggagttacagctacagcaccaccggcaggctgaccggcgttcacaccaccgcagcgaatctggatatccgcatcccgtataccacagacccggcaggtaaccgcctgcccgacccggagctgcacccggacagcgccctcagcatgtggccggataaccgtatcgcccgtgacgcgcactatctttaccggtatgaccgtcacggcaggctgacagagaaaaccgacctcatcccggaaggggttatccgcacggatgatgagcgcacccaccggtaccattacgacagtcagcaccggctggtgcactacacgcggacacaatatgcagagccgctggtcgaaagtcgctatctttacgacccgctgggccgcagggtggcaaaacgggtatggcggcgtgaacgggacctgacgggctggatgtcgctgtcacggaaaccgcaagtgacctggtacggctgggacggcgaccgcctgaccacgatacagaacgacagaacccgcatccagacgatttatcagccggggagcttcacgccactcatcagggttgaaaccgccaccggtgagctggcgaaaacgcagcgccgcagcctggcggatacccttcagcagtccggtggcgaagacggtggcagtgtggtgttcccgccggtgctggtgcagatgctcgaccggctggaaagtgaaatcctggctgaccgggtgagtgaggaaagccgccgctggctggcatcgtgcggcctgacggtggcgcagatgcaaagccagatggacccggtatacacgccggcgcgaaaaattcacctgtaccactgcgaccatcgcggcctgccgctggcccttatcagcacggaagggacaacagcgtggtacgcagaatacgatgaatggggtaacctgctgaatgaagagaacccgcatcagctgcagcagcttatccgcctgccggggcagcagtatgatgaggagtccggcctgtattacaaccgccaccgctattatgacccgctgcaggggcgatatatcactcaggatccgattgggctgaaagggggatggaatttttatcagtatccgttgaatccgatctcaaatatagatccattaggattagaaacactaaaatgcattaagccactgcattcaatgggcggaactggtgaaagaagcggtccagatatatgggggaatccgttctatcatcaatatctttgtgtcccagatggtaaaggggactatacttgtggtggccaagaccaacggggagaatcaaaaggagatggtctatgggggccaggtaaagcaagtaatgatacaaaagaagctgctggccgttgtgacctcgttgaaaccgataatagttgtgtggagaactgtttaaaagggaagtttaaagaggtaaggccgcgttattctgtattgcctgatatattcacacctataaatttagggctatttaaaaactgccaagactggtctaatgattctttagaaacatgtaagatgaagtgctccggaaataacattggacgttttattagatttgtattcaccggagtgatgtaatgaaatatattatttttttattcagagctatatggctggctttatcgcttttaatactattcttttccatgcatagactttcactattagactccactcgtgatgtgagcgagttaattagtctcatgtcttatggaatgatggtaatatgttttccaacaggcatagtattctttattgctctaatatttatagggactgtatcagacattattggcgtaaggattgatagtaagtatattatggcgataataatatggctttattttctgtcaggagggtatattcaatggtttgtattaagtaagcgcattataaacaaataaattaagttaattgctcttattattatatgtaacctgggcattgatatcccgtatgccacagacccggcaggtaaccgcctgcccgacccggagctgcacccggacagcaccctcagcatgtggccggataaccgtatcgcccgtgacgcgcactatctttaccggtatgaccgtcacggcaggctgacggagaaaaccgacctcatcccggaaggggttatccgcacggatgatgagcgcacccaccggtaccattacgacagtcagcaccggctggtgcactacacgcggacacaatatgcagagccgctggtcgaaagccgctatctttacgacccgctgggccgcagggtggcaaaacgggtgtggcgacgtgaacgggacctgacgggctggatgtcgctgtcacggaaaccgcaagtgacctggtacggctgggacggcgaccgcctgaccacgatacagaacgacagaacccgcatccagacgatttatcagccggggagcttcacgccactcatcagggttgaaaccgccaccggtgagctggcgaaaacgcagcgccgcagcctggcggatacccttcagcagtccggcggcgaagacggtggcagtgtggtgttcccgccggtgctggtgcagatgctcgaccggctggaaagtgaaatcctggctgaccgggtgagtgaggaaagccgccgctggctggcatcgtgcggcctgacggtggagcagatgcaaaaccagatggacccggtgtacacgccggcgcgaaaaatccacctgtaccactgcgaccatcgcggcctgccgctggcgcttgtcagcacggaaggggcaacagaatggtgcgcagaatacgatgaatggggcaacctgctgaatgaagagaacccgcatcagctgcagcagcttatccgcctgccggggcagcagtatgatgaggagtccggcctgtattacaaccgccaccgctattatgacccgctgcaggggaggtatatcactcaggatccgattgggctgaaggggggatggaatttttatcagtatccgctgaatccggttcagtatatagattcaatgggactggcatcaaaatatggacacttaaataatggcggatatggagcgagacccaacaaaccgcctacgcccgatccaagtaaattgccggacatagcgaaacaattaagactgccatatcctattgaccaggccagtagtgcgcctaatgttttcaaaacattcttcagagcattaagcccttacgactacacactgtattgcaggaagtgggtaaaaccaaatctgacttgtacgccacaggatgattcccagtatccagggatggatacaaagacagcaagtgattacctgccacagacaaattggccaacaactcaattaccaccaggatatacttgtgcagaaccctatttattcccagacattaataaacccgatgggccagcaacagcagggatagatgatttgggtgaaattttagctaagatgaaacagagaacatcgagaggaataagaaaatgaaaagagttttgttctttttgctgatgatatttgttagttttggtgttatagctgattgcgaaatacaagctaaagatcatgattgttttactattttcgctaagggtactattttttccgcgtttcctgtcttaaataataaagccatgtggagatggtatcagaatgaggacatcggtgagtattattggcaaacagaactgggtacatgtaaaaataataaattcacaccaagcggggcgagactcttaattcgcgtcgggtcactacgccttaatgaaaatcatgccatcaaaggaacgttgcaggagttgataaatacagcagaaaaaacggcgtttctcggcgatcggtttagaagttatataagagcgggtatctatcaaaaaaagagcagtgatccagttcagttgttggcagtccttgataattcaatcatggtaaaatattttaaagatgagaaaccaacttatgctcgaatgacagcacatctcccgaacaaaaatgagtcttacgaatgtttaataaagatacagcatgaactaattcgtagtgaagagaaataaaatctcttcctgagaaaacaaattaatcattgtgaaaaattatataactcatggaataggtgtttattttgcgttccatttgcagggaaagatcacgtaacgctacttttttgtactaaataattcgaattttaagttcaacaattgagatactacttattgtctaaagctgtttttcatagcttatacatgatcaaatactccttacataaataaggtgaacaaatggaacttaaaaaattgatggaacatatttctattacacccgattacagacaagcctggaaagtggtgcataaattgtcagatattctactgttgactatttgtgccgttatttctggtgcagaaggttgggaagatatagaggatttcggggaaacacatctcgattttttgaagcaatatggtgattttgaaaatggtattcctgttcacgataccattgccagagttgtatcccagggaaagatcacgtaacgctacttttttgtactaaataattcgcattttatgtttaaaaattgagatattccttattacctaaagctgtttttcatagcttatacatgatcaaatactccttacataaataaggtgaacaaatggaacttaaaaaattgatggaacatatttctattattcccgattacagataagcctggaaagtagagcataaattgtcaggcatcctactattgactatttttgccgttatttctggtgcagaaagttgggaagatatagaggatttcggggaaacacatctcgatttcttgaagcaatatggtgattttgaaaatggtattcctgttcacgatactattgccagagttgtatcctgtatcagtcctgcaaaatttcacgagtgctttattaactggatgcgtgattgccattcatcaaatgataaagacgtcattgcaattgatggaaaaacgctccggcactcttatgacaagagtcgccgcaggggagcgattcatgtcattagtgcgttctcaacaatgcacagtctggtcatcgggcagatcaagacggataagaaatccaatgagatcacagctatccctgaacttcttaacatgctggatattaaaggaaaaatcatcacaactgatgcgatgggttgccagaaagatattgcagagaagatacaaaaacagggaggtgattatttattcgctgtaaaaggaaaccaggggcggcttaataaagcctttgaggaaaaatttccgctgaaagaattaaataatccagagcatgacagttacgcaatgagtgaaaagagtcacggcagagaagaaatccgtcttcatattgtttgcgatgtccctgatgaacttattgatttcacgtttgaatggaaaggactgaagaaattatgcgtggcagtctcctttcggtcaataatagcagaacaaaagaaagagccagaaatgacggtcagatattatatcagttctgctgatttaaccgcagaaaagttcgccacagcaatccgaaaccactggcacgtggagaataagctgcactggcgtctggacgtggtaatgaatgaagacgactgcaaaataagaagaggaaacgccgcagaattattttcagggatacggcacatcgctattaatattttaacgaatgataaggtattcaaggcagggttaagacgtaagatgcgaaaagcagccatggatagaaactatctcgcgtcagtccttgcggggagcgggctttcgtaatctttccctgctttttgtactaaataattcgcattttatgtttaaaaattgagatattccttattacctgaagctgttttttattgcttatacatgatcaaatacttcttacataattaaggagaacaaaatggaacttaaaaaattgatggaacatatttctattatccccgattacagacaagcctggaaagtggaacataaattatcggatattctactgttgactatttgtgccgttatttctggtgcagaaggctgggaagatatagaggattttggggaaacacatcccgattttttgaagcaatatggtgattttgaaaatggtattcctgttcacgataccattgccagagttgtatcctgtatctgtcctgcgaaatttcatgagagctttattaactggatgcttgactaccattcttcagatgataaagacgtcatcgcaattgatggaaaaatacaccggcattcttatgacaagagtcgccgtaagggagcgattcatgtcattagtgcgttctcaacaatgcacagtctggtcatcggacagatcaagacggataagaaatccaatgagatcacagctatccctgaacttcttaacatgctggatattaaaggaaaaatcatcaaaaccgatgcgatgggttgccagaaagatattgcagagaagatacaaaaacagggaggtgattatttattcgctgtaaaaggaaaccaggggcggctaaataaagccttcgaggaaaaatttccgctgaaagaattaaataatcccaagcatgacagttacgcaattagtgaaaagagtcacggcagagaagaaacccgtcttcatattgtttgcgatgtccctgatgagcttattgatttcacgtttgaatagaaagggcagctatggttagaaactacctgacgtcagtccttgcggggagcaggctttcgtaaatttgtcctgctacaacaggattaacttcacaaatatcatttctcaacgtctacacttactcctgtaaaccgctcaggagcagtaatgaatctacaacgatttgatgacagcaccctaatccgtatctttgcccttcatgagttacatcgactgaaagaacatggcttaacgcgcggggcgcttctcgattatcacagccgctataaactcgtctttctggcgcattctcagccggagtaccgcaaacttggcccgttcgtggctgatattcaccagtggcaaaatctggatgactattacaaccagtaccgccaacgcgtagttgttttgctttctcaccccgccaacccgcgcgatcacaccaatgttttgatgcacgttcagggttattttcgcccgcatattgattccacagaacgccagcagctggctgcgcttatcgacagttatcgccgtggcgagcaaccacttcttgcgccgctgatgcgtatcaaacactatatggcgctttatcctgacgcctggctttcagggcagcgttatttcgaactttggccgcgtgtgattaacttgcgccattcaggagttttatgactacccatctggtctggtttcgccaggatttacgtctgcacgataatctcgcactggctgccgcctgccgcaattcgtctgcacgcgtgctggcgttgtatatcgctacaccacgccagtgggcgacgcataacatgtcgccgcgtcaggctgaacttatcaatgctcaactgaatgggctacaaatagcgcttgcggaaaaaggtattcctttattgttccgtgaagtggatgactttgtcgccagtgtcgaaatagttaaacaggtgtgcgcggaaaacagcgttacccacctgttttataactatcagtatgaagtgaatgagcgggcgcgggatgtggaagttgaaagagcgctgcgtaacgtggtgtgtgaaggatttgatgacagcgtgatcctgccgcctggcgcggtgatgaccggtaatcacgagatgtacaaagtctttacgccttttaagaatgcctggctgaaacggctgcgggaagggatgccggagtgcgtcgctgcgccaaaagttcgtagtagcggatcgatagagccctcgccatccattacgctgaattatcctcgtcagtctttcgatactgcgcattttccggtggaagaaaaagcggcgattgcgcaattacgccagttttgccagaacggtgccggagaatatgagcaacaacgagattttccggcagtggaaggcaccagccgtttgtcggccagcctggcaacgggcgggttatcgcctcgccagtgcttgcatcgcttgttggctgaacagccgcaggcgctggacggtggggccggtagtgtctggcttaatgagctgatctggcgcgagttttaccgtcacctgataacgtatcacccctcgttgtgtaaacatcgtccatttattgcctggacggatcgtgtacagtggcagagcaatcccgcacatttacaggcctggcaggaaggcaaaacgggatacccgattgttgatgccgctatgcgtcagcttaacagcactggctggatgcataacaggctacggatgattacagccagttttctggtgaaagatttattgatcgactggcgcgaaggcgagcgatatttcatgtcgcagctgattgatggtgatttggcagccaataacggtggctggcagtgggccgcttcaaccggaaccgatgcagcgccgtattttcgtattttcaacccgacaacccagggcgagaaatttgatcatgagggcgagtttatccgccagtggctaccggaactgcgcgatgtgccagggaaagtggtgcatgagccgtggaagtgggcgcagaaagcaggtgtgacgctggattatccgcaaccgatagtcgagcacaaagaagcgagagtacaaacgttggcagcgtatgaggcggcgcggaaggggaaataacagacgcgtcaggcaatcgagcccagatgccggatgcggcgtgaacgccttatccagcctacaaatttgtgcaaattcaataaattgcaggaaatacgtaggcctgataagacgcgtcaagcgtcgcatcaggcatcggtgctggcctattaagactccagcgccagcgcgcggtttctgaatttcagcgcctgatacagccaaatcatcagtaccagtcctacacacgccagtgcgccccaggtaatttgatcaaatacttcaatatatgcattgatggagtagttgatcgccccggaagcatcaaacgaagcctgcgatgtctgatcggcaatcacgcccgccagatagttcgcgatcgcgccagaaagcagcatgtagatgccggttaatacgccggtcacaccggggatttcaatgcgcgtaatttgcgacatggcaaccgggtcgataaacagttccgcaaagcccatcaccgccaggcctaataccatcagtggcagagaagagtgaccatacattgcggaccagcgggcgcttaaggtcagaatgcagaatccggcgctcatcaggccaaggccaagagcaaatttcccccagatgcgcacggtacgattacccgcgacactctcttttaccacccacgccaggaacacaccgcacagcataactgcgaaggcattaatcgactggaacatcgcggtcggaacggtataaccaaacatatcgcggttaacgaagcggtcgatataaaggctaatcgagctaccgccctgttgtgcgaaggcccagaacaacatactgaagaaggtgagcgtcacaatcagccccagctccttccgctgtttctggttttctgctttgcgataaatttttgccagtacacccaggccaataatagtcgcgacaattaaggcgtataccgaccactctttccagaacagtatggtaatcagtgcaggcgttgccaccagcagaaccagcagccatccccagttcggcaggagaaagtttgtcgcacgcagtacttttttgttaacgccgcgggtatgagtgaaatgacgattgccacataagaaaatgaccagacccgcgatcatgccaaccgccgccaggccaaagcccatcgcccagctgtactcttcctgggcgtaaccacaggcgataggtgcgataatagaccccacgttacccgccgcatacatcagcgagaaaccgccatcacgacgcggatcggttggctcatacagctcgccgagcagacagcttacgttagatttaaacaggccatagccgcagacgataatcgccagggacagatagaggaatgacggatggatctcactggcacccagcaccacatgaccgatcgccatcaacaacgcccccagcatcaccgccatgcgattgccgagaactttatccgccaaaaagccaccgaggattggcgtgacatacaccagcgaacagtaggcgctaaataactcgtaggcgtgagtatcgttgtattttagttgattggtgagatagagaatcagcagggcacgcatgccgtaaaagctaaaatattcccagatttgcagcgcaacgacatagtaaatagcgcgcggctgtgatgcgtgtttattcataataattccacaattgacggcaacgtcacgtaatagttgcgcggcgtgcttgtgtttccttaaagttaaaactttgatacagatctgattatttatgcaatatgctgtctgattgcataaatatacattagctgaagcgtgatgatataaacaatttgcgtcttttggcgtcgggtttgtttcttaatatgtcaaaagattggctatcgacgaactggcgaggtaacgctatgttaacggtgtagctatcagaatacggaaggcgcgaagatgaaaaacaccgaactggaacaactgattaacgaaaaactgaacagcgcggcgattagtgattacgcgccgaatggtttgcaggtggaaggcaaagagacggtgcaaaaaattgttaccggtgtcaccgccagccaggctttgctcgatgaggcagtgcgtctgggcgcggatgcggtcattgtgcatcatggctacttctggaaaggagagtctccggtcattcgcggaatgaagcgtaaccgtttaaaaacgttgctggcgaatgatatcaacctgtatggctggcatttgccgcttgacgcacatcctgagctgggcaataacgcacagctggcggcgttactggggatcacggtcatgggcgaaattgagccgttggtgccgtggggcgaactgaccatgcctgtgccgggactggagctggcttcctggattgaagcgcgtctgggacgtaagccgttatggtgtggcgataccggacctgaggtggtccagcgcgtcgcctggtgcacgggcggcgggcaaagttttatcgatagcgccgcgcgttttggcgtggatgcttttattactggcgaagtttctgaacagaccattcattcagcccgcgagcagggattgcatttttatgctgcaggtcaccatgccactgaacgtggtggtattcgcgcattgagcgagtggctgaatgaaaataccgatcttgatgtgacctttattgatattcctaatcctgcataacgaataatcagagggatcgaaagtgcaacgagcgcgttgttatctgataggtgaaacggcggtagtgctggaactggaaccgccggtgacgctggctagccagaaacggatctggcgactggcgcagcgtctggtggatatgccgaatgtggttgaagccattcccggcatgaacaatatcacggtgattttgcgtaatcctgagtcgctggcgctggatgccatagagcgtttgcaacgctggtgggaggagagcgaggcgctggagccggagtctcgctttattgaaattccggtggtttacggtggtgcaggcggaccggatttggcggtggtcgcggcgcattgcgggttgagcgaaaaacaggttgttgaattgcactcctccgtggaatacgtggtctggtttttaggttttcaaccgggcttcccgtatctcgggagtttgccggaacaactacacacgccacggcgcgctgaaccgcgcttactcgttccggcaggttctgtcgggatcggcgggccgcagactggtgtttatccgctggcaacgccgggtggctggcagttgattggtcatacctcactcagcctgtttgatccggcgcgtgacgaacccatcttattacgtccgggagacagcgtgcgctttgtaccgcagaaggagggagtatgctgaagattattcgtgcgggcatgtataccactgtgcaggatggcggtcgtcacggttttcgccagtcgggtatcagccactgcggcgcactggatatgcccgcgttacgcattgctaacctactggtgggtaatgacgccaatgcccccgcgctggagatcacgctcggtcagttaactgttgagttcgaaactgatgggtggtttgctctgacgggtgccggttgcgaagcgcggctggatgataatgccgtctggaccggctggcgattgccgatgaaagcaggccagcgtttaacgcttaaacgcccgcagcacgggatgcgcagttatctggcggtcgcgggtggtattgatgttccgccggtaatgggctcatgcagcaccgatctcaaagtggggattggcgggctggaaggccgtttactgaaggatggtgaccgactcccgattggcaaatcgaagcgtgattctatggaagcgcagggcgttaaacagctgctgtggggcaaccgcattcgcgccttgccggggccggaatatcatgagttcgatcgcgcctcgcaggatgcattctggcgttcgccctggcagcttagctcgcaaagtaaccgcatgggctatcgcttacaggggcaaattttaaaacgcaccaccgatcgcgaactgttatctcacggtttgttaccgggcgtggtgcaggtgccacataacgggcagccgattgtgttgatgaacgacgcacagaccaccggtggttacccgcgtattgcctgtatcattgaggctgatatgtaccatctggcgcaaattccgctcggtcagccgattcattttgtccagtgttcactggaagaggcactaaaagcacggcaagatcagcaacgttattttgaacaattagcgtggcggctgcacaatgaaaattgacctgaacgccgatctgggcgaaggctgcgccagcgacgcagagctattaacgctggtttcctctgccaatattgcctgtggatttcatgcaggcgatgcgcaaatcatgcaggcttgcgtgcgtgaagcaataaaaaatggtgtcgcgattggcgctcacccgagttttcccgacagggaaaattttggtcgcagcgccatgcagctgccgccagaaaccgtttacgcccagacgctgtatcaaattggcgcgctggcaacgattgcccgtgcgcaaggcggcgtaatgcgtcatgtcaaaccgcacggcatgttgtacaaccaggcggcgaaagaagcacaactggcagacgccatcgccagagcggtatacgcttgcgatccagcattgattctcgtcgggctggcgggaagcgagctgattcgtgcaggcaagcaatatggtctgacaacgcgcgaggaagtgtttgccgatcgcggttatcaggctgacggctcgctggtgccgcgaagccagtcaggcgcgttgattgaaaacgaagaacaggcgctggcgcaaacgctggagatggtgcaacacggcagagtcaaaagtatcaccggcgaatgggcaacggtcgcggcgcaaacggtctgcctgcatggcgacggcgagcacgcactggcgttcgcccgccgactacgctctgcatttgccgaaaaggggattgttgtcgcagcataaccccgattaataaagaatgaaaaaaggatatcaccatgcctgaaggcccggagatccgccgtgcagcggataacctggaggcggcgatcaaaggcaaaccactaactgatgtctggtttgccttcccgcagttaaaaccttatcaatcacaacttatcggtcaacacgttacccatgtggaaacgcgtggtaaggcgttgttaactcatttttccaacgacttaacgctctacagccataatcagctttacggcgtctggcgcgtggttgataccggcgaagagccgcagaccacgcgagtattgcgggtaaaactgcaaacggctgacaaaaccattctgctttatagcgcctcggatattgagatgttgaccccggaacaactgaccacgcatccgtttttacaacgcgttggtcccgatgtgctggatccgaatctgacgccggaggtggtgaaagaacgattattgtcgccgcgctttcgtaaccgtcagtttgctggattactgctcgatcaggcgtttctggctgggcttggcaattatttgcgggtggagatcctctggcaggttgggttgactggaaatcataaagcgaaagatctcaatgcggcgcaactggatgcactcgcacacgcgttactggagattcctcgattttcctacgctacgcgggggcaggtggatgagaataagcatcatggggcgctgtttcgctttaaggtttttcatcgagatggcgaaccgtgcgaacgttgtggcagcatcattgagaaaaccacgctgtcatctcgcccgttttactggtgccctggctgccagcactaggccgaccgcttcggcgcataggttgaaataaaccgcgcaatggcaggccctgtcagcaaaatactgaacaggcgtagggtttgcatcgccataatgagcgccatatcggcattgctccctgcggcgatgaccgccacggtatcaagcccgccggggctggtggcgaggtaggcagtcataaaatcaatgtgcataaaccgggtcagcccccacgccatacccgcacaaatagccagcagagcaaaaatcgacagcaggatttgcggtagcgggcgtagtgcccgcagtaagatttgtttatcgaaaccaagaccaatccgccagccaattgccatatacgccatcgccagcagccattccggtagttcgatggtgatgagctgaccagactggagcactgcgcccgccagcatcgggatgagcatcgtgccggaaggaagacgcagcaggcatcccactgtaccggcaacgaccgcgagcaaaatagtaagcaggagattaatgctcactggcgggaaccagacgatatgctggttaaccgcttcagcgttatcgcccagcatcatgcgggtgaccagaacagcggcccccgcgacgaacagcactcgcagatattgcataaacgccaccaggcgaatatctgcgccgtaatcttgcgccatagcgaccattgccgccgcgccgccaggagaggagccccaggcaccggtatttccaggcaatgagctatagcgcaccaataaccaacccacaatggcgctggaaagcagcgttaccagtaaaattgcaagcacgatcggccagttgacggccagggtggtgagaatcgaaccagtgaggttttgcgcaatcatgcagccaagaatggcctgggcggcgagaaaagcagagcggggaagttgcagagtaattccgcgcatactaaagatgatcccggcgatcatcggcccaagtaatagcgccgccgggagatgtaccgcgaggaaaccaatagaaaggagaagtgatagcacacataacattccccactgcaaaactggcatccttcgctccctcattattttctctttggtgtatcgatacagcataaagaaagctgggccaggaaaaaataacagcaatcaaggaaaaggggaaaatcagcaattttctgaaagagatgccctttccggcggcaaagggcatcatggtaaatcagttatagttaatcttaaaaagcaccactgtatcgaaggggccagcctcgatgggggtgcctggaatggacgaaagttcagccgtataggttttttcgtagaccaacatgtcactggtgaaatcggcgtattcagcatatttattgaaggtataaggcgaggcgttttcatccagtaaacgtagcttcagaccattaccaatcaacaatgctttatcttcttcaaccaacgtttcttcggtataaaaggaggaactgactttaaatccgtcggtgcattgatcgttttggctcttggtcgttttaatactgaacgttttcgacattgtgtggcgacgtatatccagcaaattaaatttaccaaaatcaatcacctgtgtttccggtgaaatggaaaaattgacgctgcaatccagcacgcgaatgttttccagaccagtaatatgatatttcaggttttgggcagtagggtcttcgttaacgctaccggcaccgtcaaattgcacgacgatatagtcgctaagcgtactttgataatcatgcggcggcatttctcgtattttgacgtataaccgcatgcgagcgagaaaggtacgcgacatatgaatattagcgggatcgcccgagcaaattttgttctgccatcccatcgcgatgatctgctcaggggtataaatatcaatgttcttactgtcgatacactggttagtgtcgatgcgactttttcccagactggcatcgtaatcgacaccgttgtatgtcacgccgagttgataataacgatcctgcacccccggataggggtttacccaggcgtagacatgctcgctttcaaagttgccgttggtattgttgtcacaatagacgggaattttaatatcgtcagattcccagatcttatcaccgggtttggcattgcctggtacagcaaacggttgaatcgcttctgatttttctactgcgccaccagatgtaccaaaatagcagttcagcgccattgcagacttcaacggcagaaataacaggcagatgacgagcaacaatcccttgccagcactcatttcgcctccactgcttgtaaacggcattgtccgctgcagttgagcgtcgtcatgcgtaatgcgccgtaatcatccatgtaaccgagataaaactggctgccgctataacttccggtgtttgtgttgaccgtactaaaaggtgcaaccatcacggttttgaagcctgggagaacgcctttttcatttctccccagataggcaatggtcagataatacgcggtaggatttttcagtgtcagttggttgccctgctggctgacctgtaactgcagttcgaccttttctcctgctttcttgcgtaatgcagccggtcgccagaacaatttaatacgactttgaatagcgacctgaagtatcgcatggtcgctgcttttatccggagcgggaggaatttcgcgcatattgtagaaaaatagcgtttcgcgatcgccaggtaattgtgtggttgaggcttgtttcacaacccgcacctgcgatgtcgctttcggttccagacgttgaatagggggcaaagcgaccagaagagcatcgcttttctcccctttttcattttctatccaggaataagcaagataaggcagtttgtcactttggttttcgatacgcaggctggtggctttgtcattggcgttaaacacaatgcgtgtgcgatcgggttgcaccgcagcattgcaacccaagctgatggttaacaacattaagggtaatcctttaataaatgtcattctcttttccttaattaatgacaaggtaaaatcaggcgtttggtcgtgtcttccagacgttctggcagatgaataatgcagctttgctcaccccagaccacggtaaacagttgattttcagcgacaccgcttaaccaggcatgtccttcctcgccaaccatacccacgctaatgccgctgtcatcctggcggatatccgcaccgaggggagggaactgaccgctggcgttgcgtatgatgacgttaacgtctttaccggaacgggaagccagtgatttgtaacctatcgcgccttcaatccatgtttccttgatgacgttttctgcaactgttacgccgtcgggtaagtcattcatgttcaccgccacggtggaaggctggtaactggaaatcaacggcaccaccgcaatgccaaaatggttggtgtagtcgagattgccctgaaccggaatatctgccacgccatcggtgctgaccatcaggcgtggttcattggtggagctgcggcgatgaaatgctgcaccatattgggttgcggtgaaagaaccgctccagctgctgctgacggaactgtaatcactggcggcataggtaccagaaatatcccactcacccgctgaactcaggtgctgatagttaccgctcacctgggctccattgtccggacgatcggattgcagtccggcagacatgccccagctattacgttcatccagcgtatcgttccacgacatgcggtgtatggtgctgtggctactgttttgcatgtcatagccaacccgaccaccgttaccgaaggggagcgaaatcgacagataaatctggttgtcgcgatctttatcttcgtagtgggtcgtattgaatgacgtcgaaatcgagatatctctccagtcaccaatatcaacattaaaacctgctgtgatgttggcggtcgtggaggcgtctgcattccaccaggtttgatgtagcaggttggcgtaaagattgaggtttagtggggtaatcggttggcccacggataagctgatcgtctgtttttcgtcctgcgcatcgctgtcgttgtatttgtgatccagatagttggcgtagctgtgaaaatgacgatctgagaagcgataagcggcgagcgaaatcgtgctgttggtggcatccacttgtttgctgtaattaaaacggtagcttaagccccgctcgtcctgctgagtatcaaaatggctactggcccaggtgacatcaaaggacagtgcgccaagccacagcatattttgcccgatacccattgcggcagaatggtagtcatcatcagaaatcagcaggccgccgtacagcgaggtgtttgagagcatcccccaggaaacttcattgctaaaaaaggtttcattttcagtttgatgtgacatggaaggccgtggctgacccgcggccaatttatagcgaacctgtccctggcgagtcaggaagggcgtcgatgctgccgaaacctggaaattgttcacccgaccatcttcttccgtcactttgacatccagcgtgccctgaacagactgattgaggtcatcaataataaacgggcctggcgggacttttttctggtaaatgacgcggcctgattgactgatcgtcaccgtggcattggtctgtgcaataccgctaatttgtggggcgtagccacgcagctcccacggtaacattcgatcgtcactcgccagtgccgcgccggtataagaaaaaccatcgaaaatattggaactgaaatcggtttcgccgagggttaacttagagcctaattgcggtaatggacgaaaaagataggtgcgcgatattccgcctgactggtcatggttatcttcgctatcggtcttattaagctggtaatcactgcgtaagcgccatgccccggcgttaattccggcggtaccgtaggcattcaggttagtgctgctgctgccgtcctgtgggcggtagctgctggcaaacaagttgtaatccatcaggacaccggcaacaccttctttccatgtagaggggggagcccagttttctgagtgccacgccagccaggcttgcggaatactaatattcagttgctgattggcttgatcgaaattgaagagcatttcaggtcgggaactgaaatcaatacaccgatctatctgtggcaaggactgacggatatctggttttaaaccaaatttatcgaccagtgaatcattgatgcatggaatggttttgtcaccctttttttgccagttaattttttgcccattactgattttgttgttattcaccgcaacgctaacaaaatattcaccgggagcaatgactcctttttcctttaataatgaaatatcaatgcggtcgcgcattgatttatcgagaacattcagattgaattcgaccgccattgcgcaaggcatcgccatgaccaggcaggatacaaaagagagtcgataaatattcacggtgtccatacctgataaatattttatgaaaggcggcgatgatgccgccaaaataatacttatttataatccagcacgtaggttgcgttagcggttacttcacctgccgtgacatcgactgcattatcaatttgttccatccaggcgaaaaagttcagcgtctgttctgatgagcttgcatccaggtcaagatctggcgcggctgaacctaatacgatgttaccgtcatttttgtccatcagtcgtacaccgaccccagttgcttcgcctgcactggtgttgctcaacaaaggcgtagcaccagttgtcttagccgtgctatcgaaggttacgccaactttggataccggcattccgctaccgttgtcagaagcaggcagatcacagttgatcaagcgaatgtcgacggccactttattgctatgatgctcccggtttatatgggttgtcgtgacttgtccaagatctatgtttttatcaatatcttctggatgaatttcacaaggtgcttcaataacctcccccttaaagtgaatttcgccagaaccttcatcagcagcataaacaggtgcagtgaacagcagagatacggccagtgcggccaatgttttttgtcctttaaacataacagagtcctttaaggatatagaataggggtatagctacgccagaatatcgtatttgattattgctagtttttagttttgcttaaaaatattgttagttttattaaatgcaaaactaaattattggtatcatgaatttgttgtatgatgaataaaatataggggggtatagatagacgtcattttcatagggttataaatgcgactaccatgaagtttttaattgaaagtattgggttgctgataatttgagctgttctattctttttaaatatctatataggtctgttaatggattttatttttacaattttttgtgtttaggcatataaaaatcaacccgccatatgaacggcgggttaaaatatttacaacttagcaatcaaccattaacgcttgatatcgcttttaaagtcgcgtttttcatatcctgtatacagctgacgcggacgggcaatcttcataccgtcactgtgcatttcgctccagtgggcgatccagccaacggtacgtgccattgcgaaaatgacggtgaacatggaagacggaatacccatcgctttcaggatgataccagagtagaaatcgacgttcgggtacagtttcttctcgataaagtacgggtcgttcagcgcgatgttttccagctccatagccacttccagcaggtcatccttcgtgcccagctctttcagcacttcatggcaggtttcacgcattacggtggcgcgcgggtcgtaatttttgtacacgcggtgaccgaagcccatcaggcggaaagaatcatttttgtctttcgcacgacgaacaaattccggaatgtgtttaacggagctgatttcttccagcattttcagcgccgcttcgttagcaccgccgtgcgcaggtccccacagtgaagcaatacctgctgcgatacaggcaaacgggttcgcacccgaagagccagcggtacgcacggtggaggtagaggcgttctgttcatggtcagcgtgcaggatcagaatacggtccatagcacgttccagaatcggattaacttcatacggttcgcacggcgtggagaacatcatattcaggaagttaccggcgtaggagagatcgttgcgcgggtaaacaaatggctgaccaatggaatacttgtaacacatcgcggccatggtcggcattttcgacagcaggcggaacgcggcaatttcacggtgacgaggattgttaacatccagcgagtcgtgatagaacgccgccagcgcgccggtaataccacacatgactgccattggatgcgagtcgcgacggaaagcatggaacagacgggtaatctgctcgtggatcatggtatgacgggtcaccgtagttttaaattcgtcatactgttcctgagtcggtttttcaccattcagcaggatgtaacaaacttccaggtagttagaatcggtcgccagctgatcgatcgggaaaccgcggtgcagcaaaataccttcatcaccatcaataaaagtaattttagattcgcaggatgcggttgaagtgaagcctgggtcaaaggtgaacacaccttttgaaccgagagtacggatatcaataacatcttgacccagcgtgcctttcagcacatccagttcaacagctgtatccccgttgagggtgagttttgcttttgtatcagccatttaaggtctccttagcgccttattgcgtaagactgccggaacttaaatttgccttcgcacatcaacctggctttacccgttttttatttggctcgccgctctgtgaaagaggggaaaacctgggtacagagctctgggcgcttgcaggtaaaggatccattgatgacgaataaatggcgaatcaagtacttagcaatccgaattattaaacttgtctaccactaataactgtcccgaatgaattggtcaatacttccacactgttacataagttaatcttaggtgaaataccgacttcataacttttacgcattatatgcttttcctggtaatgtttgtaacaactttgttgaatgattgtcaaattagatgattaaaaattaaataaatgttgttatcgtgacctggatcactgttcaggataaaacccgacaaactatatgtaggttaattgtaatgattttgtgaacagcctatactgccgccaggtctccggaacaccctgcaatcccgagccacccagcgttgtaacgtgtcgttttcgcatctggaagcagtgttttgcatgacgcgcagttatagaaaggacgctgtctgacccgcaagcagaccggaggaaggaaatcccgacgtctccaggtaacagaaagttaacctctgtgcccgtagtccccagggaataataagaacagcatgtgggcgttattcatgataagaaatgtgaaaaaacaaagacctgttaatctggacctacagaccatccggttccccatcacggcgatagcgtccattctccatcgcgtttccggtgtgatcacctttgttgcagtgggcatcctgctgtggcttctgggtaccagcctctcttcccctgaaggtttcgagcaagcttccgcgattatgggcagcttcttcgtcaaatttatcatgtggggcatccttaccgctctggcgtatcacgtcgtcgtaggtattcgccacatgatgatggattttggctatctggaagaaacattcgaagcgggtaaacgctccgccaaaatctcctttgttattactgtcgtgctttcacttctcgcaggagtcctcgtatggtaagcaacgcctccgcattaggacgcaatggcgtacatgatttcatcctcgttcgcgctaccgctatcgtcctgacgctctacatcatttatatggtcggttttttcgctaccagtggcgagctgacatatgaagtctggatcggtttcttcgcctctgcgttcaccaaagtgttcaccctgctggcgctgttttctatcttgatccatgcctggatcggcatgtggcaggtgttgaccgactacgttaaaccgctggctttgcgcctgatgctgcaactggtgattgtcgttgcactggtggtttacgtgatttatggattcgttgtggtgtggggtgtgtgatgaaattgccagtcagagaatttgatgcagttgtgattggtgccggtggcgcaggtatgcgcgcggcgctgcaaatttcccagagcggccagacctgtgcgctgctctctaaagtcttcccgacccgttcccataccgtttctgcgcaaggcggcattaccgttgcgctgggtaatacccatgaagataactgggaatggcatatgtacgacaccgtgaaagggtcggactatatcggtgaccaggacgcgattgaatatatgtgtaaaaccgggccggaagcgattctggaactcgaacacatgggcctgccgttctcgcgtctcgatgatggtcgtatctatcaacgtccgtttggcggtcagtcgaaaaacttcggcggcgagcaggcggcacgcactgcggcagcagctgaccgtaccggtcacgcactgttgcacacgctttatcagcagaacctgaaaaaccacaccaccattttctccgagtggtatgcgctggatctggtgaaaaaccaggatggcgcggtggtgggttgtaccgcactgtgcatcgaaaccggtgaagtggtttatttcaaagcccgcgctaccgtgctggcgactggcggagcagggcgtatttatcagtccaccaccaacgcccacattaacaccggcgacggtgtcggcatggctatccgtgccggcgtaccggtgcaggatatggaaatgtggcagttccacccgaccggcattgccggtgcgggcgtactggtcaccgaaggttgccgtggtgaaggcggttatctgctgaacaaacatggcgaacgttttatggagcgttatgcgccgaacgccaaagacctggcgggccgtgacgtggttgcgcgttccatcatgatcgaaatccgtgaaggtcgcggctgtgatggtccgtgggggccacacgcgaaactgaaactcgatcacctgggtaaagaagttctcgaatcccgtctgccgggtatcctggagctttcccgtaccttcgctcacgtcgatccggtgaaagagccgattccggttatcccaacctgtcactacatgatgggcggtattccgaccaaagttaccggtcaggcactgactgtgaatgagaaaggcgaagatgtggttgttccgggactgtttgccgttggtgaaatcgcttgtgtatcggtacacggcgctaaccgtctgggcggcaactcgctgctggacctggtggtctttggtcgcgcggcaggtctgcatctgcaagagtctatcgccgagcagggcgcactgcgcgatgccagcgagtctgatgttgaagcgtctctggatcgcctgaaccgctggaacaataatcgtaacggtgaagatccggtggcgatccgtaaagcgctgcaagaatgtatgcagcataacttctcggtcttccgtgaaggtgatgcgatggcgaaagggcttgagcagttgaaagtgatccgcgagcgtctgaaaaatgcccgtctggatgacacttccagcgagttcaacacccagcgcgttgagtgcctggaactggataacctgatggaaacggcgtatgcaacggctgtttctgccaacttccgtaccgaaagccgtggcgcgcatagccgcttcgacttcccggatcgtgatgatgaaaactggctgtgccactccctgtatctgccagagtcggaatccatgacgcgccgaagcgtcaacatggaaccgaaactgcgcccggcattcccgccgaagattcgtacttactaatgcggagacaggaaaatgagactcgagttttcaatttatcgctataacccggatgttgatgatgctccgcgtatgcaggattacaccctggaagcggatgaaggtcgcgacatgatgctgctggatgcgcttatccagctaaaagagaaagatcccagcctgtcgttccgccgctcctgccgtgaaggtgtgtgcggttccgacggtctgaacatgaacggcaagaatggtctggcctgtattaccccgatttcggcactcaaccagccgggcaagaagattgtgattcgcccgctgccaggtttaccggtgatccgcgatttggtggtagacatgggacaattctatgcgcaatatgagaaaattaagccttacctgttgaataatggacaaaatccgccagctcgcgagcatttacagatgccagagcagcgcgaaaaactcgacgggctgtatgaatgtattctctgcgcatgttgttcaacctcttgtccgtctttctggtggaatcccgataagtttatcggcccggcaggcttgttagcggcatatcgtttcctgattgatagccgtgataccgagactgacagccgcctcgacggtttgagtgatgcattcagcgtattccgctgtcacagcatcatgaactgcgtcagtgtatgtccgaaggggctgaacccgacgcgcgccatcggccatatcaagtcgatgttgttgcaacgtaatgcgtaaaccgtaggcctgataagacgcgcaagcgtcgcatcaggcaaccagtgccggatgcggcgtgaacgccttatccggcctacaagtcattacccgtaggcctgataagcgcagcgcatcaggcgtaacaaagaaatgcaggaaatctttaaaaactgcccctgacactaagacagtttttaaaggttccttcgcgagccactacgtagacaagagctcgcaagtgaaccccggcacgcacatcactgtgcgtggtagtatccacggcgaagtaagcataaaaaagatgcttaagggatcacgatgcagaacagcgctttgaaagcctggttggactcttcttacctctctggcgcaaaccagagctggatagaacagctctatgaagacttcttaaccgatcctgactcggttgacgctaactggcgttcgacgttccagcagttacctggtacgggagtcaaaccggatcaattccactctcaaacgcgtgaatatttccgccgcctggcgaaagacgcttcacgttactcttcaacgatctccgaccctgacaccaatgtgaagcaggttaaagtcctgcagctcattaacgcataccgcttccgtggtcaccagcatgcgaatctcgatccgctgggactgtggcagcaagataaagtggccgatctggatccgtctttccacgatctgaccgaagcagacttccaggagaccttcaacgtcggttcatttgccagcggcaaagaaaccatgaaactcggcgagctgctggaagccctcaagcaaacctactgcggcccgattggtgccgagtatatgcacattaccagcaccgaagaaaaacgctggatccaacagcgtatcgagtctggtcgcgcgactttcaatagcgaagagaaaaaacgcttcttaagcgaactgaccgccgctgaaggtcttgaacgttacctcggcgcaaaattccctggcgcaaaacgcttctcgctggaaggcggtgacgcgttaatcccgatgcttaaagagatgatccgccacgctggcaacagcggcacccgcgaagtggttctcgggatggcgcaccgtggtcgtctgaacgtgctggtgaacgtgctgggtaaaaaaccgcaagacttgttcgacgagttcgccggtaaacataaagaacacctcggcacgggtgacgtgaaataccacatgggcttctcgtctgacttccagaccgatggcggcctggtgcacctggcgctggcgtttaacccgtctcaccttgagattgtaagcccggtagttatcggttctgttcgtgcccgtctggacagacttgatgagccgagcagcaacaaagtgctgccaatcaccatccacggtgacgccgcagtgaccgggcagggcgtggttcaggaaaccctgaacatgtcgaaagcgcgtggttatgaagttggcggtacggtacgtatcgttatcaacaaccaggttggtttcaccacctctaatccgctggatgcccgttctacgccgtactgtactgatatcggtaagatggttcaggccccgattttccacgttaacgcggacgatccggaagccgttgcctttgtgacccgtctggcgctcgatttccgtaacacctttaaacgtgatgtcttcatcgacctggtgtgctaccgccgtcacggccacaacgaagccgacgagccgagcgcaacccagccgctgatgtatcagaaaatcaaaaaacatccgacaccgcgcaaaatctacgctgacaagctggagcaggaaaaagtggcgacgctggaagatgccaccgagatggttaacctgtaccgcgatgcgctggatgctggcgattgcgtagtggcagagtggcgtccgatgaacatgcactctttcacctggtcgccgtacctcaaccacgaatgggacgaagagtacccgaacaaagttgagatgaagcgcctgcaggagctggcgaaacgcatcagcacggtgccggaagcagttgaaatgcagtctcgcgttgccaagatttatggcgatcgccaggcgatggctgccggtgagaaactgttcgactggggcggtgcggaaaacctcgcttacgccacgctggttgatgaaggcattccggttcgcctgtcgggtgaagactccggtcgcggtaccttcttccaccgccacgcggtgatccacaaccagtctaacggttccacttacacgccgctgcaacatatccataacgggcagggcgcgttccgtgtctgggactccgtactgtctgaagaagcagtgctggcgtttgaatatggttatgccaccgcagaaccacgcactctgaccatctgggaagcgcagttcggtgacttcgccaacggtgcgcaggtggttatcgaccagttcatctcctctggcgaacagaaatggggccggatgtgtggtctggtgatgttgctgccgcacggttacgaagggcaggggccggagcactcctccgcgcgtctggaacgttatctgcaactttgtgctgagcaaaacatgcaggtttgcgtaccgtctaccccggcacaggtttaccacatgctgcgtcgtcaggcgctgcgcgggatgcgtcgtccgctggtcgtgatgtcgccgaaatccctgctgcgtcatccgctggcggtttccagcctcgaagaactggcgaacggcaccttcctgccagccatcggtgaaatcgacgagcttgatccgaagggcgtgaagcgcgtagtgatgtgttctggtaaggtttattacgacctgctggaacagcgtcgtaagaacaatcaacacgatgtcgccattgtgcgtatcgagcaactctacccgttcccgcataaagcgatgcaggaagtgttgcagcagtttgctcacgtcaaggattttgtctggtgccaggaagagccgctcaaccagggcgcatggtactgcagccagcatcatttccgtgaagtgattccgtttggggcttctctgcgttatgcaggccgcccggcctccgcctctccggcggtagggtatatgtccgttcaccagaaacagcaacaagatctggttaatgacgcgctgaacgtcgaataaataaaggatacacaatgagtagcgtagatattctggtccctgacctgcctgaatccgtagccgatgccaccgtcgcaacctggcataaaaaacccggcgacgcagtcgtacgtgatgaagtgctggtagaaatcgaaactgacaaagtggtactggaagtaccggcatcagcagacggcattctggatgcggttctggaagatgaaggtacaacggtaacgtctcgtcagatccttggtcgcctgcgtgaaggcaacagcgccggtaaagaaaccagcgccaaatctgaagagaaagcgtccactccggcgcaacgccagcaggcgtctctggaagagcaaaacaacgatgcgttaagcccggcgatccgtcgcctgctggctgaacacaatctcgacgccagcgccattaaaggcaccggtgtgggtggtcgtctgactcgtgaagatgtggaaaaacatctggcgaaagccccggcgaaagagtctgctccggcagcggctgctccggcggcgcaaccggctctggctgcacgtagtgaaaaacgtgtcccgatgactcgcctgcgtaagcgtgtggcagagcgtctgctggaagcgaaaaactccaccgccatgctgaccacgttcaacgaagtcaacatgaagccgattatggatctgcgtaagcagtacggtgaagcgtttgaaaaacgccacggcatccgtctgggctttatgtccttctacgtgaaagcggtggttgaagccctgaaacgttacccggaagtgaacgcttctatcgacggcgatgacgtggtttaccacaactatttcgacgtcagcatggcggtttctacgccgcgcggcctggtgacgccggttctgcgtgatgtcgataccctcggcatggcagacatcgagaagaaaatcaaagagctggcagtcaaaggccgtgacggcaagctgaccgttgaagatctgaccggtggtaacttcaccatcaccaacggtggtgtgttcggttccctgatgtctacgccgatcatcaacccgccgcagagcgcaattctgggtatgcacgctatcaaagatcgtccgatggcggtgaatggtcaggttgagatcctgccgatgatgtacctggcgctgtcctacgatcaccgtctgatcgatggtcgcgaatccgtgggcttcctggtaacgatcaaagagttgctggaagatccgacgcgtctgctgctggacgtgtagtagtttaagtttcacctgcactgtagaccggataaggcattatcgccttctccggcaattgaagcctgatgcgacgctgacgcgtcttatcaggcctacgggaccaccaatgtaggtcggataaggcgcaagcgccgcatccgacaagcgatgcctgatgtgacgtttaacgtgtcttatcaggcctacgggtgaccgacaatgcccggaagcgatacgaaatattcggtctacggtttaaaagataacgattactgaaggatggacagaacacatgaacttacatgaatatcaggcaaaacaactttttgcccgctatggcttaccagcaccggtgggttatgcctgtactactccgcgcgaagcagaagaagccgcttcaaaaatcggtgccggtccgtgggtagtgaaatgtcaggttcacgctggtggccgcggtaaagcgggcggtgtgaaagttgtaaacagcaaagaagacatccgtgcttttgcagaaaactggctgggcaagcgtctggtaacgtatcaaacagatgccaatggccaaccggttaaccagattctggttgaagcagcgaccgatatcgctaaagagctgtatctcggtgccgttgttgaccgtagttcccgtcgtgtggtctttatggcctccaccgaaggcggcgtggaaatcgaaaaagtggcggaagaaactccgcacctgatccataaagttgcgcttgatccgctgactggcccgatgccgtatcagggacgcgagctggcgttcaaactgggtctggaaggtaaactggttcagcagttcaccaaaatcttcatgggcctggcgaccattttcctggagcgcgacctggcgttgatcgaaatcaacccgctggtcatcaccaaacagggcgatctgatttgcctcgacggcaaactgggcgctgacggcaacgcactgttccgccagcctgatctgcgcgaaatgcgtgaccagtcgcaggaagatccgcgtgaagcacaggctgcacagtgggaactgaactacgttgcgctggacggtaacatcggttgtatggttaacggcgcaggtctggcgatgggtacgatggacatcgttaaactgcacggcggcgaaccggctaacttccttgacgttggcggcggcgcaaccaaagaacgtgtaaccgaagcgttcaaaatcatcctctctgacgacaaagtgaaagccgttctggttaacatcttcggcggtatcgttcgttgcgacctgatcgctgacggtatcatcggcgcggtagcagaagtgggtgttaacgtaccggtcgtggtacgtctggaaggtaacaacgccgaactcggcgcgaagaaactggctgacagcggcctgaatattattgcagcaaaaggtctgacggatgcagctcagcaggttgttgccgcagtggaggggaaataatgtccattttaatcgataaaaacaccaaggttatctgccagggctttaccggtagccaggggactttccactcagaacaggccattgcatacggcactaaaatggttggcggcgtaaccccaggtaaaggcggcaccacccacctcggcctgccggtgttcaacaccgtgcgtgaagccgttgctgccactggcgctaccgcttctgttatctacgtaccagcaccgttctgcaaagactccattctggaagccatcgacgcaggcatcaaactgattatcaccatcactgaaggcatcccgacgctggatatgctgaccgtgaaagtgaagctggatgaagcaggcgttcgtatgatcggcccgaactgcccaggcgttatcactccgggtgaatgcaaaatcggtatccagcctggtcacattcacaaaccgggtaaagtgggtatcgtttcccgttccggtacactgacctatgaagcggttaaacagaccacggattacggtttcggtcagtcgacctgtgtcggtatcggcggtgacccgatcccgggctctaactttatcgacattctcgaaatgttcgaaaaagatccgcagaccgaagcgatcgtgatgatcggtgagatcggcggtagcgctgaagaagaagcagctgcgtacatcaaagagcacgttaccaagccagttgtgggttacatcgctggtgtgactgcgccgaaaggcaaacgtatgggccacgcgggtgccatcattgccggtgggaaagggactgcggatgagaaattcgctgctctggaagccgcaggcgtgaaaaccgttcgcagcctggcggatatcggtgaagcactgaaaactgttctgaaataaatatctgtaataagaaatagccctcgccgcttccctctacaggaatggcgaagggctgtcggtttcgacatggttggccatcgtatgatggccttttttgtgcttatcgcgatgattttcgctgcgctatcagggtaaatttatagtcatcggtattaaaagcgttgcggctatattcaaacacccgaccatcaactaaatatccacgcgatactttttcaagaatcggctttgtctggctgatattaagcagacggctcatctcttcggttggcatcagaggaatgatttcctgttcgctacgatcgataaccattttcttcacttcttcgataaagtgatatttcgaattttccatgacctgccaggtgagatccgggaacaacgcaagcggcatccaggtttcttccagcgccattggcttttgcttgcgatagcgcacgcgcttcacatgccacacacgatcctgcggggtgatttgtagctgttgctgaagaaaatcgtcagccggaatcacttcgaatatcagaacttcactgtgtgtatcgacgtgacggtccgacagtttttcatcaaaactggttaactgaaaaatatcgtaattgacccgctcttctttgacgtaagtcccgctgccctgaatgctttcgaggatctgctgctcgactagctggcgcaaagcctgacgcaccgtaacccggctgacgccaaactctgtttgtagcgctgattcagtgggtaacgcatcgccaggtttaagctcgccacgcgcaatttgttcacgaatgcgatcggcaatctgccggtataagggcttgtgtcccatttttagtatctcattaatacgaatttaaccattatgcccgataaattcatcctgtaaataatacaaatacaatacaaataatttcaatcaagtgaaattgatcacataatggtattgttttatcgggcacactggcgcgactataaaaacgatcaagtgaggatcatgatgaatctgacgactctgacccaccgcgatgcgttgtgtctgaatgcgcgctttaccagccgtgaagaggccatccacgcgttgactcaacgtcttgctgctctggggaaaatttccagtactgagcaatttctggaagaagtgtatcgccgtgaaagccttggcccgaccgccttaggtgaagggttggctgtgccgcatggcaaaactgctgcggtaaaagaagcggcgtttgcggtcgccacactcagcgagccgcttcagtgggaaggcgttgatggcccggaagcagttgatttagtggtgctgctggcgattccccccaatgaagcgggtactacgcatatgcaactgctgacagcgctgaccacgcgccttgcggatgatgagattcgggcgcgtatacagtcggcgacgacgcctgatgagttgctctcggcgctggatgacaagggaggcacgcaaccttctgcctctttttccaacgcgccaactatcgtctgcgtaacggcctgtccggcgggtattgctcacacctatatggctgcggaatatctggaaaaagccggacgcaaactcggcgtaaatgtttacgttgaaaaacaaggcgctaacggcattgaagggcgtttaacggcggatcaactcaatagtgcaaccgcctgtatttttgcggctgaagtcgccatcaaggagagtgagcgttttaatggcattcccgcgctttcagtgcctgttgccgagccgattcgccatgcagaagcgttgatccaacaagcgcttaccctcaagcgtagcgatgagacgcgtaccgtacagcaagatacgcaaccggtgaaaagtgtcaaaacggagctgaaacaggcactgttgagcggaatctcttttgccgtaccgttgattgtcgcggggggcacggtgctggcggtcgcggtattactgtcgcaaatcttcgggctacaagatctgtttaatgaagaaaactcctggctgtggatgtaccgcaagctgggcggcgggctgctcggaattttgatggtaccggtgctcgcggcctataccgcctattctctggcagataaaccggcgttagcgccaggctttgcggctggacttgccgccaacatgatcggctccgggtttctcggcgcggtcgttggcggattgatagccggttacttgatgcgctgggtgaaaaatcacttgcgtcttagcagtaaattcaatggattcctgactttttatctctacccggtgctcggtacgttgggagcgggcagtctgatgctgtttgtggtgggggaacctgtcgcctggatcaataactcgcttaccgcctggctgaacggtctgtcaggaagtaacgcgctgttgctgggtgccattctcggttttatgtgttcctttgaccttggagggccagtgaataaagccgcttatgcattctgcctgggcgcaatggcgaacggcgtttacggcccgtatgccattttcgcctccgtcaaaatggtttcggcatttaccgtaaccgcttccacgatgctcgcaccgcgcctgtttaaagagtttgaaattgagaccgggaaatccacctggctgttagggctggcaggtattaccgaaggggcgatcccgatggcgattgaagatccgctgcgggttattggttcgtttgtgctgggctctatggtaacgggcgctattgtcggtgcgatgaatatcggcctttcgacacccggtgccggcattttctcgctctttttacttcatgataatggcgcgggcggtgttatggcggcaattggctggtttggcgcggcattggtgggggctgcaatctcgactgcaattctcctgatgtggcggcgtcacgcggttaagcatggcaactatctgactgatggcgtaatgccataaacaaaaaggaaacgacgatgaaagcagtatctcgcgttcacatcaccccgcatatgcactgggatcgagagtggtatttcaccaccgaagagtcacgtattctgctggtcaataatatggaagagatcctgtgccgactggaacaggacaacgaatacaaatattacgtactcgacgggcaaacggcgatcctcgaagattatttcgcggtgaaaccggaaaacaaagaccgtgtgaagaaacaggtagaagccggcaagttgattatcggcccctggtatacccagaccgataccacgattgtttctgcggaatccatcgtccgtaatctgatgtacggaatgcgtgactgcctcgcgtttggcgagccgatgaaaataggttatttaccagattcctttggcatgtccgggcaactgccgcatatctacaatggatttggcattacccgcaccatgttctggcgcggatgttcggagcgccacggtactgataaaaccgagtttttgtggcaaagcagtgacggtagcgaagtgacggcgcaggtgctgccgctgggctacgccatcggtaagtacttacctgccgacgaaaacggattacgtaaacgcctcgacagttattttgacgtgctggaaaaagcgtctgtaaccaaagagattttgctgccgaatgggcatgaccagatgccattgcagcaaaatatcttcgaagtgatggataagctacgtgagatctaccctcaacgtaagtttgtgatgagccgctttgaagaggtatttgagaagatcgaagcgcagcgagataatctggcaaccctgaaaggggaatttattgatggcaaatatatgcgcgtgcatcgcaccatcggttctacgcgtatggatatcaaaattgcccacgcgcgtattgaaaataagattgttaatctgctggaaccgctggcaacactggcctggacgttgggttttgaataccaccacggcttgctggagaaaatgtggaaagagatcttaaaaaatcatgcccacgacagtatcggctgctgctgtagtgacaaagttcatcgcgaaatcgtcgcccgcttcgaactggctgaagacatggcggataatctgattcgtttctacatgcgcaaaattgccgacaacatgccgcagagcgacgccgacaaactcgtcctgtttaacctgatgccctggccgcgtgaagaagttatcaacaccactgtgcggctgcgcgccagccagtttaatttgcgggacgatcgcggtcagcctgtaccgtattttattcgccatgcccgtgagatcgatccaggcctaatcgatcggcaaatagttcattacggtaattacgatccctttatggagtttgatatacagatcaaccagattgtcccttctatgggctatcgcacgctttatatcgaagcgaatcagcctggcaacgtaattgcggcaaaaagtgacgctgaagggatactggaaaatgctttctggcaaattgcgctcaatgaggatggttctctgcaactggtagataaagacagcggtgtgcgctatgaccgggtattgcaaattgaagaaagctctgatgatggtgatgaatatgactattcacccgcaaaagaagagtgggtaattaccgcagcgaacgcgaaaccgcaatgcgatattattcatgaagcctggcagagcagggctgttatccgctatgacatggcagtgccgctcaatttgtcagaacgcagcgcccggcaatccactggcagagtaggggtggtgttggttgtcactcttagtcataacagcaggcgtattgatgtggatatcaatcttgataaccaggctgacgatcatcgccttcgtgtcctggtccctacaccttttaacaccgacagtgttctggcagatacgcagtttggttcgctaacgcgccccgtgaacgacagtgcaatgaacaactggcagcaagaaggctggaaagaagcgccggttccggtatggaatatgctcaactatgttgccttacaggaagggcgtaacggcatggctgtctttagcgaagggttacgtgaatttgaagtcatcggtgaagagaagaaaacctttgccattacgttgctgcgtggcgtgggcttactgggcaaagaagatctgcttttaaggcctgggcggccttcgggaattaaaatgccagtcccggactcacaactacgtggtctgctttcttgtcgcctaagtttattgagttataccggtacgccaaccgccgctggtgtagctcagcaggcgcgagcatggctgactccagtacagtgttacaacaaaatcccatgggatgtgatgaagctcaacaaagccggattcaacgtgccggaaagttatagtttgttgaaaatgcccccagtgggatgcctgataagcgcacttaagaaagctgaagaccgacaagaagtgattttacggctgtttaatccggctgaatcagcaacctgtgatgcgactgttgctttcagtcgcgaggtgatttcttgctcagaaacgatgatggatgaacacattaccaccgaggaaaatcaaggttcaaatctatcggggccttttttacccggccagtcacggacgttcagttaccggcttgcctgaatagcaatcaaaccgaagccacatatgcgcggccagattgttgacaaagggcgctttgttcatgccggatacggcatgaacgctttattcggtctacaaaagcaggcaaattcaatatattgcagagatgatgtagacactggcaagcgtagcgcatcaggtaattttgcgtttatcttcactctcaagccacgtatatgtggctttatttttaacaaaataataaccctgggtgagttaattataatataattataagttaactaaatgttaatattggcggggtggatttatgcctttattagtaatcctgaaactctgcgtcgtattagccagtgaccaaaaaaagaattaaggtcaaccgtgctgtttttgcttcgtctctttttatctttaattgccaaccgaaactaatttcagccttataactcacacattttaaacataaatgtcactaaagttaccttattgaaacatgattaacataatttgtaggaattgatatttatcaatgtataagtcttggaaatgggcatcaaaaagagataaattgttctcgatcaaattggctgaaaggcggtaatttagctataaattgatcaccgtcgaaaaatgcaaatttgcttcaacaaaaacctgtttattgtaaggattttgcggcgtaatatatacgtgggatcaatttgagtttttattaacatgtttgcaacctttctttacgccgtttttgtgtgcattcacatggtatgatgaaagtgttcaaacaaatttctattggggcatgcgtgtgaccctttctaacggggttcactctcggagtcttcatgcgatgagcaaggagtcatgatgttagatatagtcgaactgtcgcgcttacagtttgccttgaccgcgatgtaccacttcctttttgtgccactgacgctcggtatggcgttcctgctggccattatggaaacggtctacgtcctctccggcaaacagatttataaagatatgaccaagttctggggcaagttgtttggtatcaacttcgctctgggtgtggctaccggtctgaccatggagttccagttcgggactaactggtcttactattcccactatgtaggggatatcttcggtgcgccgctggcaatcgaaggtctgatggccttcttcctcgaatccacctttgtaggtctgttcttcttcggttgggatcgtctgggtaaagttcagcatatgtgtgtcacctggctggtggcgctcggttcaaacctgtccgcactgtggattctggttgcgaacggctggatgcaaaacccaatcgcgtccgatttcaactttgaaactatgcgtatggagatggtgagcttctccgagctggtgcttaacccggttgctcaggtgaaattcgttcacactgtagcgtctggttatgtgactggcgcgatgttcatcctcggtatcagcgcatggtatatgctgaaaggtcgtgacttcgccttcgctaaacgctcctttgctatcgctgccagcttcggtatggctgctgttctgtctgttattgttctgggtgatgaatccggctacgaaatgggcgacgtgcagaaaaccaaactggctgctattgaagccgagtgggaaacgcaacctgcgcctgctgcctttactctgttcggcattcctgatcaggaagaggagacgaacaaatttgcgattcagatcccttacgcactgggcatcattgcaacgcgttccgtggataccccggttatcggcctgaaagagctgatggtgcagcatgaagaacgcattcgtaacgggatgaaggcgtactctctgctcgaacaactgcgttctggttctaccgaccaggcggttcgtgaccagttcaatagcatgaagaaagacctcggttacggtctgctgctgaaacgctatacgccaaacgtggctgatgcgactgaagcgcagattcaacaggcaaccaaagactccatcccgcgtgtagcgccgctgtactttgcgttccgtatcatggtggcgtgtggcttcctgcttctggcaatcatcgcgctctctttctggagtgtcatccgcaaccgcattggcgagaaaaaatggcttctgcgcgccgcgctgtacggtattccgctgccgtggattgctgtagaagcgggctggttcgtggctgaatatggccgccaaccgtgggctatcggtgaagtgctgccgacagctgtggcgaactcgtcactgaccgcaggcgatctcatcttctcaatggtgctgatttgcggcctgtataccctgttcctggtggcagaattgttcttaatgttcaagtttgcacgcctcggcccaagcagcctgaaaaccggtcgctatcactttgagcagtcttccacgactactcagccggcacgctaagacaggagtcgtcaaatgatcgattatgaagtattgcgttttatctggtggctgctggttggcgttctgctgattggttttgcagtcactgacggtttcgacatgggggtgggcatgctcacccgtttcctcggtcgtaacgacaccgagcgtcgaattatgattaactccattgcaccacactgggacggtaaccaggtttggctgatcaccgcgggcggcgcactctttgctgcctggccgatggtctatgccgctgcgttctccggcttctatgtggcgatgatcctcgtgctggcgtctttgttcttccgtccggtcggttttgactaccgctccaagattgaagaaacccgctggcgtaacatgtgggactggggcatcttcattggtagcttcgttccgccgctggtaattggtgtagcgttcggtaacctgttgcagggcgtaccgttcaacgttgatgaatatctgcgtctgtactacaccggtaacttcttccagttgcttaacccgttcggcctgctggcaggcgtggtgagcgtagggatgatcattactcagggcgcaacctatctgcaaatgcgtaccgtgggcgaactgcacctgcgtacccgtgcaacggctcaggtggctgcgctggtgacactggtctgtttcgcactggctggcgtatgggtgatgtacggtatcgatggttatgtcgtgaaatcgacaatggaccattacgcagcctctaacccactgaataaagaagtggttcgtgaagctggcgcatggctggttaacttcaacaacacgccaattctgtgggctattccggcactgggtgtggttctgccgctgctgaccatcctgactgcacgtatggataaagccgcgtgggcgtttgtgttctcctccctgacgctggcctgcatcatcctgacagccggtatcgcaatgttcccgtttgtgatgccgtccagcaccatgatgaacgcaagtctgacaatgtgggatgcaacttccagccagctgacgcttaacgtcatgacctgggttgcggtggttctggtaccgatcattctgctctacaccgcctggtgttactggaaaatgttcggtcgtatcaccaaagaagatattgaacgtaacacccactctctgtactaagtaaggagctaaaaatgtggtatttcgcatggattctgggaacgcttcttgcctgttcgtttggggtaatcaccgcgctggcgcttgaacacgtcgaatcaggcaaagccggtcaagaagacatctgatgagtaagattatcgcgactttgtatgcggtaatggacaagcgccccctgcgggcgctttccttcgtgatggcgcttctgttagcaggatgtatgttttgggacccatctcgttttgccgcgaagaccagtgaactggaaatctggcatggtttattgctgatgtgggccgtctgtgctggtgtgattcacggcgtgggctttcgtccgcagaaggttctttggcaagggattttttgcccattgcttgccgatattgttctcattgtcgggctgattttcttcttcttttaaatcagaattctctttaaaaaattatgggccgctccaggcccataaatttttacgctcccttaacttgccctcattcccaaacctcaatcgcgcgcgtatagtagcagcgtttaaaagctctaacttttgttgcattaccgggatgtaaagtgaatacaacgctgtttcgatggccggttcgcgtctactatgaagataccgatgccggtggtgtggtgtaccacgccagttacgtcgctttttatgaaagagcacgcacagagatgctgcgtcatcatcacttcagtcagcaggcgctgatggctgaacgcgttgcctttgtggtacgtaaaatgacggtggaatattacgcacctgcgcggctcgacgatatgctcgaaatacagactgaaataacatcaatgcgtggcacctctttggttttcacgcaacgtattgtcaacgccgagaatactttgctgaatgaagcagaggttctggttgtttgcgttgacccactcaaaatgaagcctcgtgcgcttcccaagtctattgtcgcggagtttaagcagtgactgacatgaatatccttgatttgttcctgaaggctagccttctggttaaacttatcatgttgattttgattggtttttcaatcgcatcttgggccattattatccagcggacccgtattcttaacgcagcggcgcgcgaagccgaagcgtttgaagataaattctggtctggaatcgaactctctcgcctctatcaagagagccaggggaaacgggataatctgactggttcggaacaaatcttttacagcgggttcaaagagtttgtgcgcctgcatcgtgccaatagccatgcgccggaagccgtagtggaaggggcgtcgcgtgctatgcgtatctccatgaaccgtgaacttgaaaatctggaaacgcacattccgttcctcggtacggttggctccatcagcccgtatattggtctgtttggtacggtctgggggatcatgcacgcctttatcgccctcggggcggtaaaacaagcaacactgcaaatggttgcgcccggtatcgcagaagcgttgattgcgactgcaattggtctgtttgccgctatcccggcagttatggcctacaaccgcctcaaccagcgcgtaaacaaactggaactgaattacgacaactttatggaagagtttaccgcgattctgcaccgccaggcgtttaccgttagcgagagcaacaaggggtaagccatggccagagcgcgtggacgaggtcgtcgcgatctcaagtccgaaatcaacattgtaccgttgctggacgtactgctggtgctgttgctgatctttatggcgacagcgcccatcatcacccagagcgtggaggtcgatctgccagacgctactgaatcacaggcggtgagcagtaacgataatccgccagtgattgttgaagtgtctggtattggtcagtacaccgtggtggttgagaaagatcgcctggagcgtttaccaccagagcaggtggtggcggaagtgtccagccgtttcaaggccaacccgaaaacggtctttctgatcggtggcgcaaaagatgtgccttacgatgaaataattaaagcactgaacttgttacatagtgcgggtgtgaaatcggttggtttaatgacgcagcctatctaaacatctgcgtttcccttgcttgaaagagagcgggtaacaggcgaacagtttttggaaaccgagagtgtcaaaggcaaccgaacaaaacgacaagctcaagcgggcgataattatttcagcagtgctgcatgtcatcttatttgcggcgctgatctggagttcgttcgatgagaatatagaagcttcagccggaggcggcggtggttcgtccatcgacgctgtcatggttgattcaggtgcggtagttgagcagtacaaacgcatgcaaagccaggaatcaagcgcgaagcgttctgatgaacagcgcaagatgaaggaacagcaggctgctgaagaactgcgtgagaaacaagcggctgaacaggaacgcctgaagcaacttgagaaagagcggttagcggctcaggagcagaaaaagcaggctgaagaagccgcaaaacaggccgagttaaagcagaagcaagctgaagaggcggcagcgaaagcggcggcagatgctaaagcgaaggccgaagcagatgctaaagctgcggaagaagcagcgaagaaagcggctgcagacgcaaagaaaaaagcagaagcagaagccgccaaagccgcagccgaagcgcagaaaaaagccgaggcagccgctgcggcactgaagaagaaagcggaagcggcagaagcagctgcagctgaagcaagaaagaaagcggcaactgaagctgctgaaaaagccaaagcagaagctgagaagaaagcggctgctgaaaaggctgcagctgataagaaagcggcagcagagaaagctgcagccgacaaaaaagcagcagaaaaagcggctgctgaaaaggcagcagctgataagaaagcagcggcagaaaaagccgccgcagacaaaaaagcggcagcggcaaaagctgcagctgaaaaagccgctgcagcaaaagcggccgcagaggcagatgatattttcggtgagctaagctctggtaagaatgcaccgaaaacggggggaggggcgaaagggaacaatgcttcgcctgccgggagtggtaatactaaaaacaatggcgcatcaggggccgatatcaataactatgccgggcagattaaatctgctatcgaaagtaagttctatgacgcatcgtcctatgcaggcaaaacctgtacgctgcgcataaaactggcacccgatggtatgttactggatatcaaacctgaaggtggcgatcccgcactttgtcaggctgcgttggcagcagctaaacttgcgaagatcccgaaaccaccaagccaggcagtatatgaagtgttcaaaaacgcgccattggacttcaaaccgtaatcgcgatgttgactgttcggacggtcaacatcaggcaccggttgccacggggttctggtagttttgtgtattttagtttgttaacattctgctaaattatcgtgggccatcggtccagataagggagatatgatgaagcaggcattacgagtagcatttggttttctcatactgtgggcatcagttctgcatgctgaagtccgcattgtgatcgacagcggtgtagattccggtcgtcctattggtgttgttcctttccagtgggcggggcctggtgcggcacctgaagatattggcggcatcgttgctgctgacttgcgtaacagcggtaaatttaatccgttagatcgcgctcgtctgccacagcagccgggtagtgcgcaggaagtacaaccagctgcatggtccgcactgggcattgacgctgtagttgtcggtcaggtcactccgaatccggatggttcttacaatgttgcttatcaacttgttgacactggcggcgcaccgggtactgtacttgctcagaactcgtacaaagtgaacaagcagtggctgcgttatgctggtcataccgccagtgatgaagtgtttgaaaaactgaccggcattaaaggtgcgttccgtactcgtattgcctacgttgttcagaccaacggcggtcagttcccgtatgaactgcgcgtatctgactatgacggttacaaccagtttgtcgttcaccgttcaccgcagccgctgatgtctccggcgtggtcaccagacggttctaaactggcttatgtgaccttcgaaagcggtcgttccgcgctggttattcagacgctggcaaatggcgctgtacgtcaggtggcttcattcccgcgtcacaacggtgcacctgcattctcgccagacggcagcaaactggcattcgccttgtcgaaaaccggtagtctgaacctgtacgtaatggatttggcttctggtcagatccgccaggtgactgatggtcgcagtaacaataccgaaccgacctggttcccggatagccagaacctggcatttacttctgaccaggccggtcgtccgcaggtttataaagtgaatatcaacggcggtgcgccacaacgtattacctgggaaggttcgcagaaccaggatgcggatgtcagcagcgacggtaaatttatggtaatggtcagctccaatggtgggcagcagcacattgccaaacaagatctggcaacgggaggcgtacaagttctgtcgtccacgttcctggatgaaacgccaagtctggcacctaacggcactatggtaatctacagctcttctcaggggatgggatccgtgctgaatttggtttctacagatgggcgtttcaaagcgcgtcttccggcaactgatggacaggtcaaattccctgcctggtcgccgtatctgtgataataattaattgaatagtaaaggaatcattgaaatgcaactgaacaaagtgctgaaagggctgatgattgctctgcctgttatggcaattgcggcatgttcttccaacaagaacgccagcaatgacggcagcgaaggcatgctgggtgccggcactggtatggatgcgaacggcggcaacggcaacatgtcttccgaagagcaggctcgtctgcaaatgcaacagctgcagcagaacaacatcgtttacttcgatctggacaagtacgatatccgttctgacttcgctcaaatgctggatgcacatgcaaacttcctgcgtagcaacccgtcttacaaagtcaccgtagaaggtcacgcggacgaacgtggtactccggaatacaacatctccctgggtgaacgtcgtgcgaacgccgttaagatgtacctgcagggtaaaggcgtttctgcagaccagatctccatcgtttcttacggtaaagaaaaacctgcagtactgggtcatgacgaagcggcatactccaaaaaccgtcgtgcggtactggtttactaagagaattgcatgagcagtaacttcagacatcaactattgagtctgtcgttactggttggtatagcggccccctgggccgcttttgctcaggcaccaatcagtagtgtcggctcaggctcggtcgaagaccgcgtcactcaacttgagcgtatttctaatgctcacagccagcttttaacccaactccagcaacaactttctgataatcaatccgatattgattccctgcgtggtcagattcaggaaaatcagtatcaactgaatcaggtcgtggagcggcaaaagcagatcctgttgcagatcgacagcctcagcagcggtggtgcagcggcgcaatcaaccagcggcgatcaaagcggtgcggcggcatcaacgacgccgacagctgatgctggtactgcgaatgctggcgcgccggtgaaaagcggtaatgcaaacacggattacaatgcagctattgcgctggtgcaggataaatcccgccaggatgacgcaatggtggcatttcagaatttcatcaaaaattaccctgattcaacttacctgccaaacgccaattattggctgggtcagttaaactacaacaagggtaaaaaagatgatgcggcgtactattttgcttcggtagtgaaaaactatccgaagtcaccaaaggctgcagatgcgatgtttaaagtcggcgtcatcatgcaggacaaaggtgacaccgcaaaagcgaaagccgtataccagcaggttatcagtaaataccctggtactgatggcgctaaacaggcacaaaaacgtctgaacgcgatgtaatgcataacacacgaccagaagtcgcattatttctggtcgtgtcgtgcgaatcataagcagttgagtgatctacatcgaaatttttgttgcgctcaagtctgaaatcagtaatatatgccgccgttgccacgggatatcaaacaaaccgaaagcaacgaaaaagtgggtcgttagctcagttggtagagcagttgacttttaatcaattggtcgcaggttcgaatcctgcacgacccaccaatcgctaaggtggaagcggtagtaaaacgtgaaggataacgttgcatgagcaacggcccgaagggcgagacgaagtcgagtcatcctgcacgacccaccactaacatagttagttgtagtatccagcgtagtatcgggtgattagctcagctgggagagcacctcccttacaaggagggggtcggcggttcgatcccgtcatcacccaccaccgggtcgttagctcagttggtagagcagttgacttttaatcaattggtcgcaggttcgaatcctgcacgacccaccagttttaacatcgaagacagatgttaagcgtgtaggataacgttgcgtcagcaacggcccgtagggcgagcgaagcgagtcatcctgcacgacccaccactaatgacggtgggttcggtggaagtagtttgtagtatccagcgcagtatcgggtgattagctcagctgggagagcacctcccttacaaggagggggtcggcggttcgatcccgtcatcacccaccactcgggtcgttagctcagttggtagagcagttgacttttaatcaattggtcgcaggttcgaatcctgcacgacccaccagttttaacatcaaactcagatgttaagcgtgaaggataacgttgcgccagcaacggcccgtagggcgagcgaagcgagtcatcctgcacgacccaccaatcttaaagattggccccgagtaaaaatctttcaggtaacacccgtatgggtcgttagctcagttggtagagcagttgacttttaatcaattggtcgcaggttcgaatcctgcacgacccaccaatttaaaggtggttactggtagagaacgtgaaggataacgttgcgttagcaacggcccgaagggcgagacgaagtcgagtcatcctgcacgacccaccatcctgaatgattaaggcagcataatcccgcaaggggtcgttagctcagttggtagagcagttgacttttaatcaattggtcgcaggttcgaatcctgcacgacccaccaatgtaaaaaagcgccctaaaggcgcttttttgctatctgcgatactcaaagattcgaacctgcagcaggtttgagttgagcgcagcgaaacaacggagccgctcgcggcgacggcccgaagggcgagcgaagcgagtcatcctgcacgacccaccaatgtaaaaaagcgccctaaaggcgcttttttgctattcaggcatcctcaatttcactttgtaaacctgatgacatcgtcagagcttactgtgcaagcaactctatgtcggtggaattaggcgtaaaatgacgcatcctgcacattaggcgtaattcgagtgacttttccccaccattcgactatcttgtttagcatataaaacaaattacaccgataacagcgaatattacgctaatgtcggttttaacgttaagcctgtaaaacgagatggtaagatgagcgtaatgtttgatccagacacggcgatttatcctttccccccgaagccgacgccgttaagcattgatgaaaaagcgtattaccgcgagaagataaaacgtctgctaaaagaacgtaatgcggtgatggttgcccactactataccgatcccgaaattcaacaactggcagaagaaaccggtggctgtatttctgattctctggaaatggcgcgcttcggtgcaaagcatcccgcttctactttgttagtcgctggggtgagatttatgggagaaaccgccaaaattctcagtccggaaaaaacaattctgatgccgacacttcaggctgaatgttcactggatctcggctgccctgttgaagaatttaacgcattttgcgatgcccatcccgatcgtactgtcgtcgtctacgccaacacttctgctgcggtaaaagcgcgcgcagattgggtggtaacttcaagcattgccgtcgaacttattgatcatcttgatagtttgggtgaaaaaatcatctgggcacccgacaaacatctggggcgttacgtgcaaaaacagacgggtggagacattctatgctggcagggtgcctgtattgtgcatgatgaatttaagactcaggcgttaacccgcttgcaagaagaatacccggatgctgccatactggtgcatccagaatcaccacaagctattgtcgatatggcggatgcggtcggttccaccagtcaactgatcgctgctgcgaaaacattgccacatcagaggcttattgtggcaaccgatcggggtattttctacaaaatgcagcaggcggtgccagataaagagttactggaagcaccaaccgcaggtgagggtgcaacctgccgcagctgcgcgcattgtccgtggatggccatgaatggccttcaggccatcgcagaggcattagaacaggaaggaagcaatcacgaggttcatgttgatgaaaggctgcgagagagggcgctggtgccgctcaatcgtatgctggattttgcggctacactacgtggataacgaataataaggcgtaacgttacgctttgggggaaagatggatttttttagtgtgcagaatatcctggtacatataccaataggggcaggcggttatgatctctcatggatcgaagcggtaggcacgatcgccgggttgctgtgtattggccttgccagtctggagaagatcagcaactacttctttggcctgatcaacgtcaccttgtttggcattattttctttcagattcagctgtatgccagcctgctattacaggtgtttttctttgccgcgaatatttacggttggtatgcgtggtcgcgacaaaccagtcagaacgaggcggagttgaaaattcgctggttgccattgccgaaggcactcagctggttggcggtttgcgttgtttcgattggtctgatgacggtatttatcaatccggtgtttgcatttttgacccgcgtggcagtcatgatcatgcaagcattaggattacaggttgtgatgcctgaactgcaaccggacgctttcccgttctgggattcatgcatgatggtgttatctatcgtggcaatgattctgatgacgcgtaagtatgtggaaaactggctgttgtgggtgattattaacgtgattagcgtcgttatttttgcacttcagggcgtttacgccatgtctctggagtacatcatcctgacctttattgcgctcaacggcagccggatgtggatcaacagcgcacgtgaaagaggctcacgcgcgctgtcccattaatggtgatgatgtgaatggccagacaccccttcattcaggtggcagtctggcccatgacaaggttgatattccatctgaatggtggcgtgctcaatctgatagtgatccatcaggtagtgttggatctgatccaacaaggcatcgtgatcgtgtggcgggatcacctgcacatgcaacgtcatcaccggcttctcgcctaccatccatacatgtacatggtgcacattgcggacttccgggatttcccggcacatacgacgcttcagttcagcgatatccagcgataccggtgcaccttcaagtaattcattcacgctatctttcaacagtcgccacgcgctacgcagaaccagaagcgacaccagtatcgagagaatggggtcagcaggtgtccagccagtccagataataatcaacgcggcaataatagccccaaccgaacccagcaggtccccgagcacatgcagtgccgctgctcgtacgttgaggtttttctcttcgctgccgtgatgaagtaaccagaaagaaagtatatttgccagcaacccagccacggcaattgccatcatcatgccgccctcgaccggacgcggcgtgcggaagcgttctatcgcctcccagacaatcaaaatggtaattaccacgagggctatggcattcacaaacgccgcgagcgtggtcagtcttagccaaccgaaagtgtggcgaatggtgggaggacgacgtgaaaattgcacggcgagtagggcgaaaagcagggcggcagtatcggtcaacatatgacccgcatcggccagcaatgccagagaaccagaaagaaaaccaccaacgacttctaccagcataaacccggcagtcacgccgaaagcatacaacaagcgacgagcattattatcttctggcaggtgtgaggacgtgtgtgagtgtgagtgcgccatgacgagtcatcccttaattattctcacttaactttatgacatcatactgcttttagaagtgaaaaattaaaagggagagactccgctctcccattattggctattttgcagggttactgcgtggtaccgtcggttttggtatcgacatcattattgatgccatcaccggtttgtacctttttattgatatccggacagcgaccatctttgcacatggtgttcttgtgctcttcatctttggtcattccgtcattgttcattgaagaaccatccgaatgcagcattgtgccgccagaaccggtatttaccccgttattgtcgacgttatttggcgcgacattttcacgggcgtcaggggctacctggcccgcatcagctgcggcgtttgcctggccgttattagtttgcgctccgctatcggcagccagtgcggcaccgctggcaaggcttagagtggcagtcagaaataatgtggccagttttgtcattttcataggatgctcctgttatggtcgttatgtcggataacctcttccaacagtgcatttgcaggtgaatataaggcattggtttaagatttcagccaggttatgaaacgcagcagagaatcttgaaataattaacaaacaaaggagttacagttagaaattgtaggagagatctcgtttttcgcgacaatctggcgtttttcttgctaattccaggattaatccgttcatagtgtaaaaccccgtttacacattctgacggaagatatagattggaagtattgcattcactaagataagtatggcaacactggaacagacatgaattatcagaacgacgatttacgcatcaaagaaatcaaagagttacttcctcctgtcgcattgctggaaaaattccccgctactgaaaatgccgcgaatacggttgcccatgcccgaaaagcgatccataagatcctgaaaggtaatgatgatcgcctgttggttgtgattggcccatgctcaattcatgatcctgtcgcggcaaaagagtatgccactcgcttgctggcgctgcgtgaagagctgaaagatgagctggaaatcgtaatgcgcgtctattttgaaaagccgcgtaccacggtgggctggaaagggctgattaacgatccgcatatggataatagcttccagatcaacgacggtctgcgtatagcccgtaaattgctgcttgatattaacgacagcggtctgccagcggcaggtgagtttctcgatatgatcaccccacaatatctcgctgacctgatgagctggggcgcaattggcgcacgtaccaccgaatcgcaggtgcaccgcgaactggcatcagggctttcttgtccggtcggcttcaaaaatggcaccgacggtacgattaaagtggctatcgatgccattaatgccgccggtgcgccgcactgcttcctgtccgtaacgaaatgggggcattcggcgattgtgaataccagcggtaacggcgattgccatatcattctgcgcggcggtaaagagcctaactacagcgcgaagcacgttgctgaagtgaaagaagggctgaacaaagcaggcctgccagcacaggtgatgatcgatttcagccatgctaactcgtccaaacaattcaaaaagcagatggatgtttgtgctgacgtttgccagcagattgccggtggcgaaaaggccattattggcgtgatggtggaaagccatctggtggaaggcaatcagagcctcgagagcggggagccgctggcctacggtaagagcatcaccgatgcctgcatcggctgggaagataccgatgctctgttacgtcaactggcgaatgcagtaaaagcgcgtcgcgggtaaggtttaattgtcggatgcgccgtcagagtggcgtatccgatgaatcaccacaggcctgataagtcgcgcagcgtcgcatcaggcaatgtgctccattgttagcaacaaaaaagccgactcacttgcagtcggctttctcattttaaacgaatgacgtttacttcgctttaccctggtttgcaaccgccgctgctttcgctgcgatctcgtcagcattacccagataatagcgtttcagcggtttgaaattctcgtcgaactcatacaccagcggcacgccagtcgggatattaagctcaagaatctcttcttcgctcatgttatcaagatatttcaccagcgcacgtaaagagttaccgtgtgcagcgatgatcacgcgctcaccgctcttcatacgcggcagaatagtttcattccagtaagggatcacgcggtcaatggtcagcgccaggctttccgtcagcggcagttctttctcgctcagtttcgcgtaacgcggatcgtgacccggataacgctcatcatctttagtcagttccggcggagtcactgcaaaaccacgacgccactgtttcacctgctcgtcgccatacttttcagcagtttccgctttgttcagaccctgcaacgcaccgtagtgacgttcgttcagtttccaggatttctcaacgggcagccatgcctgatccagttcgtccagcacattccacagggtatggatagcgcgtttcagcacagaagtgtaagcaaagtcaaagctgtaaccttcctctttcagcagcttacctgctgcttttgcttcgcttacgcctttctcagacagatccacgtcgtaccaaccggtgaaacggttttctttgttccactgactttcgccatgacgaaccagaaccagcttagttacagccatatacttactcctcaaatcatcttttaatgataataattctcattatattgccgcgacgaagcaacagcaatgcttacgcataaccatagcgaaaatagtggcgcagtgtaaggttgttgtgaatattgagttgcaaatatgtcggtgtttgctggtgatttgaacaatatgagataaagccctcatgacgagggcgtaacattactcagcaataaactgatattccgtcaggctggaatactcttcgccaggacgcaggaagcagtccggttgcggccattcagggtggttcgggctgtccggtagaaactcgctttccagagccagcccttgccagtcggcgtaaggttcggttccccgcgacggtgtgccgccgaggaagttgccggagtagaattgcagagccggagcggtggtgtagaccttcagctgcaatttttcatctgctgaccagacatgcgccgccactttcttgccatcgcctttggcctgtaacaagaatgcgtgatcgtaacctttcactttgcgctgatcgtcgtcggcaagaaactcactggcgatgattttggcgctgcggaaatcaaaagacgttccggcgacagatttcaggccgtcgtgcggaatgccgccttcatcaaccggcagatattcgtccgccagaatctgcaacttgtgattgcgcacgtcagactgctcgccgtcaagattgaaatagacgtgattagtcatattcaccgggcaaggtttatcaactgtggcgcgataagtaatggagatacggttatcgtcggtcagacgatattgcaccgtcgcgccgagattacccgggaagccctgatcaccatcatctgaactcagggcaaacagcacctgacgatcgttctggttcacaatctgccagcgacgtttgtcgaacccttccggcccgccgtgcagctggttaacgccctgacttggcgaaagcgtcacggtttcaccgtcaaaggtataacggctattggcgatacggttggcataacgaccaatagaggcccccagaaacgcggcctgatcctgatagcattccgggctggcacagccgagcagcgcctcgcggacgctgccatcggaaagcggaatacgggcggaaagtaaagtcgcaccccagtccatcagcgtgactaccatccctgcgttgttacgcaaagttaacagtcggtacggctgaccatcgggtgccagtgcgggagtttcgttcagcactgtcctgctccttgtgatggtttacaaacgtaaaaagtctctttaatacctgtttttgcttcatattgttcagcgacagcttgctgtacggcaggcaccagctcttccgggatcagcgcgacgatacagccgccaaatccgccgccggtcatgcgtacgccacctttgtcgccaatcacagctttgacgatttctaccagagtgtcaatttgcggcacggtgatttcgaaatcatcgcgcatagaggcatgagactccgccatcaactcgcccatacgtttcaggtcgccttgctccagcgcgctggcagcttcaacggtgcgggcgttttcagtcagtatatgacgcacgcgttttgccacgatcgggtccagttcatgcgcaacagcgttgaactcttcaatggtgacatcacgcagggctggctgctggaagaaacgcgcaccggtttcgcactgttcacgacgggtgttgtattcgctgccaaccagggtacgtttgaagttactgttgatgatgacgacagccacacctttgggcatggaaactgctttggtccccagtgagcggcaatcgatcagcaaggcatgatctttcttgccgagcgcggaaattagctgatccatgatcccgcagttacagcctacaaactggttttctgcttcctgaccgttaagcgcgatttgtgcgccgtccagcggcagatgataaagctgctgcaatacggttccgaccgcgacttccagtgaagcggaagaacttaacccggcaccctgcggcacattgccgctgatcaccatgtccacgccgccgaagctgttgttacgcagttgcagatgtttcaccacgccacgaacgtagttagcccattgatagttttcatgtgcgacaatgggcgcatcgagggaaaactcgtcgagctgattttcataatcggctgccatcacgcgaactttacggtcatcgcgtggtgcacaactgatcacggtttgataatcaatcgcgcagggcagaacgaaaccgtcgttgtagtcggtgtgttcaccaatcaaattcacgcggccaggcgcctgaatggtgtgagtggcagggtagccaaatgcgttggcaaacagagattgtgttttttctttcagactcatttcttacactccggattcgcgaaaatggatatcgctgactgcgcgcaaacgctctgctgcctgttctgcggtcaggtctcgctgggtctctgccagcatttcataaccaaccataaatttacgtacggtggcggagcgcagcagaggcggataaaagtgcgcgtgcagctgccagtgttgattctcttcgccattaaatggcgcgccgtgccagcccatagagtaggggaaggagcactggaagaggttgtcataacgactggtcagctttttcaacgccagcgccagatcgctgcgctgggcgtcggtcaaatcggtgatccgtaaaacgtgggctttgggcagcagtagcgtttcgaacggccaggcagcccagtaaggcacgacggctaaccagtgttcggtttcgacaacggtacggctaccgtctgccagctcgcgctgaacataatccaccagcattggtgatttctgttcggcaaaatattctttttgcaggcggtcttcgcgctcagcttcgttaggcaggaagctatttgcccaaatctgaccgtgcggatgcgggttagagcagcccatcgccgcgcctttgttttcaaaaacctgcacccatgggtacgttttccccagttctgcggtttgctcctgccaggttttgacgatttccgtcaatgctgcaacgctgagctctggcagcgttttactgtgatccggtgaaaagcagatcacccggctggtgccgcgcgcgctctggcaacgcatcagcggatcgtgactttctggcgcatctggcgtgtcagacatcaaagccgcaaagtcattagtgaaaacgtaagtcccggtgtaatcggggtttttatcgcctgtcacccgcacattacctgcgcagaggaagcaatctggatcgtgcgcaggtaacacctgtttggctggcgtttcctgcgccccctgccaggggcgcttagcgcggtgcggtgaaaccagaatccattgcccggtgagcgggttgtagcggcgatgtggatgatcaacgggattaaattgcgtcatggtcgttccttaatcgggatatccctgtggatggcgtgactgccagtgccaggtgtcctgcgccatttcatcgagtgtgcgcgttacgcgccagttcagttcacggtcggctttgctggcgtccgcccagtaggccggaaggtcgccctcgcgacgcggtgcaaaatgataattaaccggtttgccgcaggctttgctgaaggcattaaccacgtccagcacgctgttgcctacgccagcgccgaggttgtagatgtgtacgcctggcttgttcgccagtttttccatcgccacgacgtgaccgtccgccagatccattacgtggatgtaatcgcgtacgccagtaccatcttcggtcggataatcgttaccaaaaatcgccagcgagtcgcgacggcctacagcaacctgggcgatgtatggcatcaggttattcggaatgccttgcggatcttcgcccatatcgcccgacggatgcgcgccaaccgggttgaagtagcgcagcagggcaatgctccagtccggctgggctttttgcagatcggtgaggatctgttccaccatcagcttgcttttgccgtaagggctttgcggtgtgccggtcgggaagctttcaacgtatggaattttgggctgatcgccataaacggtggcggaggagctaaaaataaagtttttgacgttagcggcgcgcatggcgctaatcaggcgcagagtgccgttgacattgttgtcgtaatattccagcggtttttgtaccgattcgcccacggctttcagcccggcgaagtggatcacggtgtcgatagcgtgatcgtgcaggatctcggtcatcaacgcttcgttacgaatatcgccttcaacaaacgttggatgtttgccgcctaaacgctcgataacaggcagtacgctgcgcttactgttacagaggttatcaagaatgatgacatcatgaccgttttgcagtaattgcacacaggtatgacttccaatgtaaccgctaccaccggtaaccagaactctcataattcgctccattaggcttatggtatgaaataaccatagcataacaaagatgcgaaaagtgtgacatggaataaattagtggaatcgtttacacaagaatttagccgttttttatgcgcgattaagtgattataaaacagagggtttatgaatgattgcgctttttatctgaaaaaagacgcggtttcatgcctgcatgcgtcgaaccgttggccggagagggtgctaaggccgcctccggcaaggtcagcactaccgactcaatatatttttgtcagcacatagcgatagagtccaccgtccggcacgaactcaagacgatgggtaatacaggcaggcgcatcttcagcgtggtgcgaaacaaacaacaattgcgtttcaccttcgctaatcagcacatcaacaaaacggcggataagctggcgattcagcggatcaagcccctgtagtggttcatcgagaataagcaacgtcggatgtttcaccagtgcgcggacaatcagcgccagacgctgctgtccccaggaaagactatggaacggagcgtcagccgtgcgtttatcaatgccgagaatatccagccactgctgcaccagtttttgctggcgatccgaaacggcctgataaatgccaatcgaatcaaaatagccagaaagaatcacattacgcacggtagtgctgacccggtaatccagatgcaaactactgctgacgtaaccgatatgctttttgatatcccagatggtttcgccgctgccgcgacgtcgtccgaaaagcgtcaaatcgttgctgtaaccttgcggatgatcgccagtaaccaggcttaataacgtcgattttcctgcaccatttggcccgacaatttgccagtgttcgcctggattcacctgccagctaaggttattaagaatggggcgatcgttataagaaaccacgccattgttcagcacaatgcgcggttcgttggcgggtaaggcgtgacgtgctgaaggttcatccggctccggcagttgcacaccttcaagctgttcactatgcgccagttgcgcgacgagtgcttgttggagcagttcctctttagcgccagtttccgctaacgtgcaatccgccagcacgccagcaaactggacaaactccgggatctcatcgaagcgattgagcaccagtaccagagtaataccggactgatgtaacgaggcgagtcgctcagccagctgctgacgtgaggcaacatccaggccatcgaacggctcatcaagaatcaacaagtcaggctccgacatcagcgcctgacacagcagggtttttcgcgtctcgccagtggaaaggtatttaaagcgtcggtcgaggagggcggtaataccgaactgctgcgccagttgcatgcaacgcggtgcatcctttacttcatcctgaatgatctcagccgtagtgcgtccggtgtcatcttcgccagggccgagcatatcggtgttattccgctgccattcgtcgctgacgagtttttgcaattgctcgaaggagagacgagtgatgtgggaaaactggctttgccgttcacctttcaaaagcggaagttcccccgccagcgcgcgggccagggccgatttcccgcttccattcgaaccgacaaacgcccaactatcacccgcgtttaacgttagctgaggcaattgcagcgtttttgtgtcgctaagacgaaacgtgccttgcaaaatttgcaacgatgacattttatatcccactttgtgcagcgattactgacagggatacgtgtttcataacaaattgtcaacacgcttagcacagcgtggcgataatcacgctgtcggcattaaagtaggccgtgacattctgtccttgctgaagagaagtcgcttcatttaccggcactgtggcgcacagtgtttgcccgtcgggtagcgccattaatacttcgcactgctctgcgccgcgctcaatatgactaataatacccggtaattggttgtcagcgttttgcgcgaccgcctcgtcctgagtaatacctacccacggcgcttttagcaatatcaacacttctttgccttcatccagccccagacgcgcgccgctttgtgcggtaattgcgactttcaggcgtgtttttccgtcagccagtaagacatcaacatgctgttgaacgtcatcatgatcgcgggcggtgatggtaccgaaccactggttacgggcgctggtttgcagtgaaaaacgtgagatcgcggccagcaggctgttcagcggcagggcgtcatcgtcacttaacacatcaaaggctttttgctggatttgcgccagtaagtcatagagctgaatcagtcgctgaccatagcgggtcagtactgcgccgccgccacctttaccgcctgttgcgcgctcgaccagaatatgctcacttaactgattcatctcgttaatggcatcccaggcgcttttatagctaataccggcatctttcgctccctggctaatggaaccggaaagcgcaatgtgttttagtagcgaaatgcggcgcgggtcggcgaataatttttgttggagcttaagggtgagaaggatttcggcctgcataacaatgtcctggcaaaagtcttattgtgacggaaaacgaacgccacgcaaagctgaccgcacaaaaggggagtgcttttctgtgcttagcggttagaatagtctcatgactatatctggagttgaccatgttagagttattaaaaagtctggtattcgccgtaatcatggtacctgtcgtgatggccatcatcctgggtctgatttacggtcttggtgaagtattcaacatcttttctggtgttggtaaaaaagaccagcccggacaaaatcattgattccctgaatgcccgcttagtcgggcattttctttttctcaacttcctgcttttcctgccgatattttttcttatctacctcacaaaggttagcaataactgctgggaaaattccgagttagtcgttatattgtcgcctacataacgttacattaaggggttaccaatggctcgtaaatggttgaacttgtttgccggggcggcactctctttcgctgttgctggcaatgcactggcagatgaagggaaaatcacggtgttcgccgccgcatcactgactaacgcaatgcaggacattgctacgcagtttaaaaaagagaaaggcgtggatgtggtttcttctttcgcttcgtcatctactctcgcccgtcagattgaagcgggtgcgcctgcggatctgtttatttctgccgatcagaaatggatggattatgcggttgataaaaaagcgatcgatacagctacgcgtcagacactgctcggcaatagcctggtcgttgtagcaccgaaagccagcgtgcagaaagatttcaccatcgacagcaaaaccaactggacttcactgctgaatggcggtcgcctggcggttggcgatccggaacatgttcccgctggcatttatgcaaaagaagcactgcaaaaactgggcgcatgggatacgctctctccgaaactggccccagcggaagatgttcgtggggcgctggcgctggtcgaacgtaacgaagcgcctctgggcattgtctacggttctgacgcagttgccagcaaaggggtaaaagtggttgccaccttcccggaagattcacataaaaaagtggaatatccggttgctgttgtggaagggcataacaatgcgacagtgaaagcattttatgattatctgaagggaccgcaggcagcggaaatctttaaacgttacggatttacaatcaagtaatgatactgaccgatccagaatggcaggcagttttattaagcctgaaagtttcttccctggctgtgctgtttagcctgccgtttgggatcttttttgcctggttactggtgcgttgcacgtttccgggcaaagctctgctcgacagcgtactgcatctaccgctggtgttaccgcccgtggtcgtcggttacttattattagtttcgatgggacggcgcggatttatcggtgaacgtctgtatgactggtttggtattaccttcgcctttagctggcgcggcgcggttctcgctgccgccgtcatgtcgtttccgctgatggtgcgggcaattcgtctggcgctggaaggggttgatgtcaaactggaacaggccgcaagaacactgggggccgggcgctggcgcgttttctttactatcacgttaccgctgaccttaccgggaattattgttggtacggtactggcttttgctcgttctctcggtgagtttggtgcaaccatcacctttgtgtcgaacattcctggtgaaacgcgaaccattccttctgccatgtataccctgatccagacccccggcggggaaagtggagcggcgagactgtgcattatttctattgcgctggcgatgatctccctgttgatttcagaatggctggccagaatcagccgtgaacgggcggggcgctaatcatgctggaactgaatttttcccagacgttgggcaaccattgcctgactattaatgaaacgctgcccgccaatggcatcactgctatctttggcgtctccggtgccggaaaaacttcgctgattaacgccatcagtggactgacgcgcccgcaaaaagggcggattgtcctcaatgggcgggtactaaatgatgccgaaaaaggtatctgcctgacgccggaaaagcgtcgcgttggctatgtttttcaggatgcgcggctgttcccgcattacaaagtgcgtggcaatctgcgctacggcatgtcgaaaagtatggtcgatcagttcgataagctggtggcgcttttaggcattgaaccgttgcttgaccgtttaccaggcagcctgtccggaggcgaaaaacagcgcgtggcgattggtcgggctttgctgacagcaccggaattgctgttgctggatgaaccgctggcgtcactggatattccgcgtaaacgcgaactgttgccttatctgcaacggctgacacgggaaatcaacattccgatgttgtatgtcagccattcgctggatgagatcctccatctggcagacagagtgatggtactggaaaacggtcaggtgaaagcctttggcgcgctggaggaagtgtggggcagtagcgtgatgaatccgtggctgccgaaagagcaacaaagtagcattctgaaagtgacggtgcttgagcatcatccgcattacgcgatgaccgcgctggcgctgggcgatcagcatttgtgggtcaataagctggacgaaccgctgcaagctgcgctacgtatccgcattcaggcttccgatgtttctctggttttacaaccgccgcagcaaaccagcattcgtaacgtattgcgggcaaaagttgttaatagttatgacgacaacggccaggtggaagtggaactggaagtcggcggtaaaacgctgtgggcgcgtatcagcccgtgggccagggatgaactggcgatcaaacctggcctgtggctgtacgcgcaaattaaaagtgtgtcgataaccgcctgattaaatcaggtggctataaatgaactgggcaatgctgtcggtggtgttatcaccaatcacaatgttggcgcgcgcttttaccgcgtcatcggcgttgcccatcgccacgcctgtaccagcggcttccagcatactgatatcattaaagttatcgccgaatgccacgacgttttccatcgaccaaccttgcgcctcaacccatttcgtcaaacgtttacctttgctgttgccgccgcgtgcaatatcaacctgatcgtgccaggaccattcacactccagtcccagttcatgttcgacatgcttaccaaaatgctgcaattgcggcaggtcatcgtgcgtcagggcgaacttccatacggcgttaacttgttgcgccgtttcagccagagaagcgacttgtgtgaaagtcggacgctgttccggcggcagggtttgcgcccagttagatgtgcgaatgacatgcccggtcgggtgctcatagaccattgcatcatcgacatacatcagaccgtgaatgtggtgttcattcagcatctcaatgagttgcagggctttaataacgggcattgggtccgcttccagcacggtttttgcatgataatcatacaaataggtgccattacagcaaatagcaggtgtatccagcgccagcgcctgataaaaaggatgaatagcgacgtgatggcgacctgtgacgatgattaattgatagcctgcttcgcgagcgcgggccagggcttctatcgatgaaggaagcagggtctttttcggggtcaataaggtgccgtctaagtcgagagcaatcacgcgtgtggtcatggcgtattccagattaaggttaagaattttcgtctgcgcgaatggtacaccgataccactatcggacaaaattctgcgttttaattcagcattcaccgccaaaagcgactaattttagctgttacagtcagttgctaaatgcaaaggagcattcatgaagcaaacagtttatatcgccagccctgagagccagcaaattcacgtctggaatctgaatcatgaaggcgcactgacgctgacacaggttgtcgatgtgccggggcaggtgcagccgatggtggtcagcccggacaaacgttatctctatgttggtgttcgccctgagtttcgcgtcctggcgtatcgtatcgccccggacgatggcgcactgacctttgccgcagagtctgcgctgccgggtagtccgacgcatatttccaccgatcaccaggggcagtttgtctttgtaggttcttacaatgcgggtaacgtgagcgtaacgcgtctggaagatggcctgccagtgggcgtcgtcgatgtggtcgaggggctggacggttgccattccgccaatatctcaccggacaaccgtacgctgtgggttccggcattaaagcaggatcgcatttgcctgtttacggtcagcgatgatggtcatctcgtggcgcaggaccctgcggaagtgaccaccgttgaaggggccggcccgcgtcatatggtattccatccaaacgaacaatatgcgtattgcgtcaatgagttaaacagctcagtggatgtctgggaactgaaagatccgcacggtaatatcgaatgtgtccagacgctggatatgatgccggaaaacttctccgacacccgttgggcggctgatattcatatcaccccggatggtcgccatttatacgcctgcgaccgtaccgccagcctgattaccgttttcagcgtttcggaagatggcagcgtgttgagtaaagaaggcttccagccaacggaaacccagccgcgcggcttcaatgttgatcacagcggcaagtatctgattgccgccgggcaaaaatctcaccacatctcggtatacgaaattgttggcgagcaggggctactgcatgaaaaaggccgctatgcggtcgggcagggaccaatgtgggtggtggttaacgcacactaaccgctgatttacccggcgcagtctctcctgcgccggtgtattaacctatctcctgtaacgcgtgtctctggcgttcgacgatattggtccacaaattgtctttatcgtcagtccataaattaatcagcaaggcaaaaaagcgttctgctgctggagaaagtacggcatctttacggcgaattattcccaatgttcgacgtataacgggttccaccaatgggataccaataatcgaagaatagggcgcatgaggcattgccaggccaggaagcgccgaaatccccagtcccgcctccaccagtcctaatgacgtcgaaagatgacgcacttcgtaaaaccagtccagcttccagggcttgtcggccagctgttgttctatcaacagtcggttgccgctggaggagcgtacgccaatcattttgtaacccactaactcctgccattctacaagctgctttttggccaatggatggtcacgccgacaggccagcacgaacggctcgttgaccagtggggtaaaatcaatggatgaatttgtgacgttgttcatgtttatgccaaagtctgattcgttacacagcaccgattccatgcaattattcgtgccttgttccagaatccgcactttaatattgggatacagctcattaaatttaccgattgccagcggtaaaaaataaaatactgcggtcggaatacacgctaacgtcaccataccacgatgataagcattcatatcacgaatattaaaaagcgtttcatcgaatttctttattaattcccgcgcctccgggagcaacctttttcctgcttttgttaacgtaaccttgcgagttgtacgctcaaatagttgaacatgtaaatcttcctccatcttttttattcttcgcgttaatgcaggttgcgtaatattgagtaatttagcggcattgttaaacgaactggactctgccagtatgacaaatgccttcatacttgataattcatgcttcattattactccggaaaatggaagcgacgattttgggtggctggccgttaaaaattttaactgcatttagccaacttaaattaatgaaaaaatgttattaatcgttgagctaaagtcattagagatgctttgcccttaatgtaaccatatcgcaataagttatgtttttaaattgagggcattattatgaaaaaaataccctgcgtgatgatgcgaggtggaacctcgaggggcgcgttcctgttagcggaacatttacccgaagatcaaacgcagcgcgataaaatattgatggcaattatgggttccggtaacgatctggaaattgacggtattggcggcggtaatccactgaccagtaaagtcgccattattagccgttccagcgatccgcgtgctgatgtcgattatctgtttgcgcaggtaatcgttcatgagcaacgtgtcgataccacgcctaactgcggcaatatgctgtctggtgttggggcattcgccattgaaaatggtttgattgcagcgacttcgccagttactcgcgtacgtatccgcaacgtcaatacgggtacgttcatcgaagctgatgtgcaaacgccaaatggtgttgtcgagtacgagggtagcgccagaattgacggcgtaccgggtactgccgcaccggttgcgctcactttcctgaatgccgctggaaccaaaaccggaaaagttttcccgactgataatcagattgattattttgacgatgtcccggtgacctgtatcgatatggcgatgccagtcgtcattattccggctgaatatctgggaaaaacaggttatgaattaccggcggaactggatgccgacaaagcattattagcccgcattgaatctatccgtctacaagcgggtaaagcaatgggcttaggtgatgtcagtaatatggttatccctaaacctgtgcttatttctccagcgcagaaaggcggggcaattaatgtgcgttattttatgccgcattcttgccatcgcgcgctggcgataaccggtgctattgctatttccagtagttgtgcattggaaggcaccgtcacccgacaaatcgtcccttctgtaggatacggcaatatcaatattgaacaccccagtggtgcgctcgacgttcatttaagtaatgaaggtcaggatgccacgacgttacgcgcatctgttattcggacgaccagaaaaatattttccggtgaagtttatcttccctgaaaaaattcgttgtcaggataaggacaatcaataaaggacttctgtatgagtcatacagaaagaacaggattttaaatgaataagaaatcgttatggaagctaattctgatattagcgatcccatgtattattggttttatgccagctccggcaggattaagcgaactggcgtgggtgctttttggtatttacctggcggccattgtggggctggttatcaagcctttcccggaacctgtcgtactgttaattgccgttgctgcctcaatggtggtggtcggtaacttatccgacggtgcgtttaaaaccaccgccgtattaagcggttactcttcaggtaccacctggctggtgttctcggcgtttaccttaagcgccgcatttgtgaccaccggtttaggtaaacgtattgcctatctgctgattggtaaaatcggtaacaccacgctgggtctgggttacgttacggtattcctcgatctggtactggctccggcaacaccgtctaacaccgcgcgtgcgggcggcattgtgttaccgatcatcaacagcgtggcggtggctttggggtccgaaccggaaaaaagtccgcgtcgtgtcggacattacctgatgatgtccatttacatggtcaccaaaaccaccagctatatgttctttaccgcaatggcggggaacattctggcgctgaaaatgatcaacgacattctgcacctgcaaattagctggggtggatgggcgctggcagccggattgccgggcatcattatgctgctggtcaccccgctggtgatttacaccatgtatccaccagaaattaagaaggtggataacaaaaccatcgctaaagcgggccttgccgaactaggaccgatgaaaatccgcgaaaaaatgctgctcggtgtctttgtgctggcgctgctgggctggattttcagtaagtctctgggggttgatgaatccaccgtggcaatcgttgttatggcaaccatgctgctgctgggtatcgttacctgggaagacgtggttaaaaataaaggcggctggaataccttaatctggtacggcggtattatcggcttaagctccttattatcgaaagttaaattcttcgaatggttagctgaagtctttaaaaataacctggcatttgatggtcacggtaacgttgctttcttcgttattattttcctcagcattatcgtgcgttatttcttcgcttccggtagtgcctatatcgttgctatgttaccggtatttgccatgctggcgaacgtctccggcgcaccgttaatgttaaccgcgctggcactgttgttctccaactcctatggcggcatggttactcactatggcggcgcggcaggtccggtcatctttggcgtgggttataacgatattaaatcctggtggttggtcggtgcggtactgacgatattaaccttcctggtgcatatcaccctcggcgtgtggtggtggaatatgctgatcggctggaacatgctgtaaatattctcgtcatacttcaagttgcatgtgctgcgtctgcgttcgctcaccccagtcacttacttatgtaagctcctggggattcactcgcttgtcgccttcctgcaactcgaattatttagagtatatccatttattatctttctgcgcacttcacggtgcgcagatatctggagcatttgatgatcaagttatctgaaaaaggcgtgtttctcgccagtaataacgaaataattgccgaagaacatttcaccggcgaaattaaaaaagaagaagccaaaaaaggcactattgcctggtctattctctcttcgcataatacgtccggaaatatggataaacttaaaattaagtttgattcattagcctctcacgatattacctttgttggtattgtacagaccgctaaagcgtccggtatggaacgtttcccgctgccgtatgtgctgaccaactgccataactcactctgcgccgtcggcggcactattaacggtgatgaccatgtttttggtttatcggcggcccagcgttatggcggtatttttgtgcctccgcatattgcggtcatccatcaatatatgcgtgagatgatggcaggcggcggcaaaatgatcctcgggtcagacagccacacccgttacggtgcattagggacaatggcagtcggtgagggcggcggtgagttggtaaaacagctgcttaatgacacctgggatatcgactatccgggcgtggttgcggtgcatctgaccggaaaacctgcgccgtatgtggggccacaggatgtggcgctggctatcattggcgcggtgttcaaaaacggttacgtcaaaaacaaagtcatggagttcgttggaccgggcgttagcgcgctctctaccgatttccgtaacagcgttgacgtgatgaccactgaaacgacctgtttaagttctgtctggcaaaccgatgaagaagtccataactggctggcgctgcacggtcgcggccaggattactgccagcttaaccctcaaccgatggcgtactacgatggctgcatcagcgttgatttaagcgccatcaaaccaatgattgcgctgccgttccacccgagcaacgtgtatgaaatcgacacactgaaccagaacctgaccgacattctgcgtgagattgaaattgagtccgaacgcgtggcgcacggtaaagccaaactctcgctgctggataaagtggaaaatggtcgcctgaaagtgcagcaggggattatcgcgggctgttctggcggtaactacgaaaacgtcatcgcggcggcgaatgcactgcgcggtcaatcctgtggcaatgacaccttctcgctggcagtttacccgtcatcacagccggtgtttatggatctcgccaaaaaaggtgtggtagcagatttgattggcgcaggcgcaatcatcagaaccgcgttctgcggcccatgctttggcgcgggcgatacgccaatcaacaacggtttgagtattcgccacaccacgcgtaacttcccgaaccgcgaaggctctaagccagctaatgggcagatgtcagcggtggcgttgatggacgctcgttctatcgctgcgactgcggcaaacggtggctatttaacctctgccagcgaacttgattgctgggacaacgtgccggagtacgccttcgatgtaacgccgtataaaaaccgtgtttatcagggctttgtgaaaggggcaactcagcaaccgctgatttacgggccgaacattaaagactggccggaattgggtgcgctgactgacaatatcgtcctgaaagtgtgctcgaagatcctcgacgaagtgaccaccaccgacgaactgattccttccggtgaaacctcttcttatcgttcaaatccgattggtctggcggagtttaccctgtctcgccgcgatcccggttatgttagcagaagtaaagcgactgctgagctggaaaatcagcgtctggcggggaatgtcagcgagctgacagaggtgtttgcgcgcattaagcagattgctggtcaggagcatattgatccgctgcaaactgaaattggcagcatggtctatgcggtgaaaccaggcgatggttctgcgcgtgaacaggcggcgagctgccagcgtgtgattggcggtctggcgaatattgccgaggagtacgcgactaaacgctatcgttctaacgtcatcaactgggggatgttaccgctgcaaatggcggaagtaccaacctttgaagtgggggattacatttacatccctggcattaaagcggcgctggataatccgggtacgacgtttaaaggttatgtgatccatgaagatgcgccggtaacggaaattacgctctatatggaaagtctgactgctgaagagcgcgagattatcaaggcgggtagtttgattaacttcaataaaaaccgtcagatgtaaaaagcgccatgtgaatgtaggtcgcattcggcacttattgtcggatgcgatgcttgcgcatcttatccgacctacgaatcgcatcgaatctgtaggccagataaggcattttcgcagcatccggcacttattgtcggatgcgatgcttgcgcatcttatccgacctacaaatcgcatcgaaccgtaggccggataaggcgtttacgccgcatccggcaaatagttaattgctcttacttcttcgcctctgcaaccactttactacccacgccgcggttattgtattcccacatgcggttgtagttagtgtcattcagattgcgctgtatttcgtcgttatcatctacgctgccggtattacccgcaaacggacgattagagatcaccgcatcggcccacggtttagccgtgttaaaaccttcgttgatggcgctatcacggatcaccacctgaccgttggtattggcatcaacatccagcgagcggcccagttgcgccacaccatcaccgaaagcattgaaacggctgtttacggcgaggaaaccgtagtaaatgttggacagcgtagccggtgcaaacacatacgcttcttgctgagtacgtgagttcaccacgcggaattcggtgttatcgaacaccactgcgccgcgaccagaaacgatatccacatccccttcaatgtagctgttggtcaccagcgtacgcggctgacgattcgtttccagacggttctgcacaccgctgttggtgacaaagaaggtgttctgacgaccgagaatgttaacgttgttaatctgtacctggtcaccatcagtacgcagtgccaccgccggatggttacctgcatctacgctatcgcccagcgtgttttcgatggtcagattttgcagttgcaggccattgttttgtgaccagaagaccgcagagcagagaacaccgatactgtcgctgcgtttgctctggcagctatcgtacatataccacgctggtttacctggcatatatttgccgcgcgggttgacgtcgtgacgccagtcggcagggctcatgccaccatcaagggaaagcccaatcttcacatcaatcggtttttcacctgtaccgtacagagtaattccacccggagcggcagggacatataccgttccctgatactcaccaggcatcacggcaatatactggcgcttgttggtacgcttgataattgccgcatctaccgccgcctgaatcgtggtatgcgttacaccttgagtgcccgccgggccgacaacaaagtcaggttgcgcaggcagggtaatcggggaaggattccacgctgcagcacctggtgtcagggatgcaaaatagtgttgagcatcgaaattctgcgcttcttttgccgacagaatcgggcgagaagaggtaccaggcgcggtttgatcagaaggacgttgatcgggcggggttgagctacaggcggtcagcgtcacgccaaaagccaatgccagcgccagacgggaaactgaaaatgtgttcacaggttgctccgggctatgaaatagaaaaatgaatccgttgaagcctgcttttttatactaacttgagcgaaacgggaaggtaaaaagacaaaaagttgtttttaatacctttaagtgataccagatggcattgcgccatctggcagagtgattaactaaacatcgcagtaatcgaggcgcttgccagagagtggaaatgaacgttaaacccgaccatcgcgccgctggcaccttcatcgacatcaatacgttctatatccagcgcgtgaacggtaaaaatgtagcgatgagtttcgcctttcggcggtgctgcgccatcgtacccggttttaccaaagtcggtacgcgtctgcaaaacgccgtctggcattgctaccagaccagagccaaacccttgcggtaatacgcgggtatcagcgggtaagttaacaactacccagtgccaccagccggagccggttggcgcatccgggtcgtagcaggtgacaacaaaacttttcgttcccgcaggaacatcatcccacgccagatgcggtgaaatattatcgccatcgtaacccatgccgttaaagacatgacgatgcggcaatttatcgccatcgcgcagatcgttactgatgagtttcatgaaccctcctttcttgtttgcagaaagtgtagccagaaaccctcacgcggacttctcgttattggcaaaaaaatgtttcatcctgtaccgcgcggttaaccgctgcggtcagacgctgcaactgttgcgggagaataatatagggcggcatcaggtaaatcagtttgccaaaaggccggatccagacaccctgttcgacaaagaatttttgcagcgccgccatattcaccggatgagtggtttcgaccacgccaatggcccccagtacgcgcacatcggcaaccatttcggcatcacgggcgggggcaagttgctcgcgcagctgtacttcaatatccgccacctgttgctgccagtcgccagattcgagaatcgccaggctggcgtttgctgccgcgcaggccagcggattgcccataaaagttggcccatgcataaagcaaccggcttcaccgttactgatggtttctgcaacctcgcgcgtggtgagtgtggcggaaagggtcattgtgccgccggttaaggctttaccgaggcacaaaatgtccggcgcgatttctgcatgttcacaggcaaacagtttcccggtacgaccaaatccagtggcgatctcgtcggcaatcagcaagataccttcgcgatcgcatattttgcggattcgttttaaccattccggatggtacatgcgcatcccgcctgcgccctggacaatcggctcaatgatcaccgccgcgatttcatgacgatgcgccgccatcaggcgggcaaagcccaccatatcgcgctcatcccattcgccatccatgcggctttgcggggcgggagcaaacaggttttctggcaggtagcctttccacagactgtgcattgagttatccggatcgcacaccgacatcgcgccaaaggtatcgccatgataaccattgcggaaggtcagaaaacgctggcgcgcttcgcctttggcttgccagtactgcaacgccattttcatcgccacttccaccgctacggaaccggagtccgcgagaaaaacgcactccagcggttgcggcgtcatcgccaccagtttgcggcacagctcaatggctggcgcatgggtgataccgccaaacatcacatgcgacatggcatcaatttgcgacttcatcgccgcattaagctgcgggtgattgtagccgtggatcgccgcccaccaggacgacataccgtcaaccaggcgtctgccgtcagacaaaatcagctcgcaaccttcggcgctcaccaccggataaaccggcagaggggaggtcatggatgtgtatgggtgccagatatggcgttggtcaaaggcaagatcgtccgttgtcataatcgacttgtaaaccaaattgaaaagatttaggtttacaagtctacaccgaattaacaacaaaaaacacgttttggagaagccccatggctcaccgcccacgctggacattgtcgcaagtcacagaattatttgaaaaaccgttgctggatctgctgtttgaagcgcagcaggtgcatcgccagcatttcgatcctcgtcaggtgcaggtcagcacgttgctgtcgattaagaccggagcttgtccggaagattgcaaatactgcccgcaaagctcgcgctacaaaaccgggctggaagccgagcggttgatggaagttgaacaggtgctggagtcggcgcgcaaagcgaaagcggcaggatcgacgcgcttctgtatgggcgcggcgtggaagaatccccacgaacgcgatatgccgtacctggaacaaatggtgcagggggtaaaagcgatggggctggaggcgtgtatgacgctgggcacgttgagtgaatctcaggcgcagcgcctcgcgaacgccgggctggattactacaaccacaacctggacacctcgccggagttttacggcaatatcatcaccacacgcacttatcaggaacgcctcgatacgctggaaaaagtgcgcgatgccgggatcaaagtctgttctggcggcattgtgggcttaggcgaaacggtaaaagatcgcgccggattattgctgcaactggcaaacctgccgacgccgccggaaagcgtgccaatcaacatgctggtgaaggtgaaaggcacgccgcttgccgataacgatgatgtcgatgcctttgattttattcgcaccattgcggtcgcgcggatcatgatgccaacctcttacgtgcgcctttctgccggacgcgagcagatgaacgaacagactcaggcgatgtgctttatggcaggcgcaaactcgattttctacggttgcaaactgctgaccacgccgaatccggaagaagataaagacctgcaactgttccgcaaactggggctaaatccgcagcaaactgccgtgctggcaggggataacgaacaacagcaacgtcttgaacaggcgctgatgaccccggacaccgacgaatattacaacgcggcagcattatgagctggcaggagaaaatcaacgcggcgctcgatgcgcggcgtgctgccgatgccctgcgtcgccgttatccggtggcgcaaggagccggacgctggctggtggcggatgatcgccagtatctgaacttttccagtaacgattatttaggtttaagccatcatccgcaaattatccgtgcctggcagcagggggcggagcaatttggcatcggtagcggcggctccggtcacgtcagcggttatagcgtggtgcatcaggcactggaagaagagctggccgagtggcttggctattcgcgggcactgctgtttatctctggtttcgccgctaatcaggcagttattgccgcgatgatggcgaaagaggaccgtattgctgccgaccggcttagccatgcctcattgctggaagctgccagtttaagcccgtcgcagcttcgccgttttgctcataacgatgtcactcatttggcgcgattgcttgcttccccctgtccggggcagcaaatggtggtgacagaaggcgtgttcagcatggacggcgatagtgcgccactggcggaaatccagcaggtaacgcaacagcacaatggctggttgatggtcgatgatgcccacggcacgggcgttatcggggagcaggggcgcggcagctgctggctgcaaaaggtaaaaccagaattgctggtagtgacttttggcaaaggatttggcgtcagcggggcagcggtgctttgctccagtacggtggcggattatctgctgcaattcgcccgccaccttatctacagcaccagtatgccgcccgctcaggcgcaggcattacgtgcgtcgctggcggtcattcgcagtgatgagggtgatgcacggcgcgaaaaactggcggcactcattacgcgttttcgtgccggagtacaggatttgccgtttacgcttgctgattcatgcagcgccatccagccattgattgtcggtgataacagccgtgcgttacaactggcagaaaaactgcgtcagcaaggctgctgggtcacggcgattcgcccgccaaccgtacccgctggtactgcgcgactgcgcttaacgctaaccgctgcgcatgaaatgcaggatatcgaccgtctgctggaggtgctgcatggcaacggttaataaacaagccattgcagcggcatttggtcgggcagccgcacactatgagcaacatgcagatctacagcgccagagtgctgacgccttactggcaatgcttccacagcgtaaatacacccacgtactggacgcgggttgtggacctggctggatgagccgccactggcgggaacgtcacgcgcaggtgacggccttagatctctcgccgccaatgcttgttcaggcacgccagaaggatgccgcagaccattatctggcgggagatatcgaatccctgccgttagcgactgcgacgttcgatcttgcatggagcaatctcgcagtgcagtggtgcggtaatttatccacggcactccgcgagctgtatcgggtggtgcgccccaaaggcgtggtcgcgtttaccacgctggtgcagggatcgttacccgaactgcatcaggcgtggcaggcggtggacgagcgtccgcatgctaatcgctttttaccgccagatgaaatcgaacagtcgctgaacggcgtgcattatcaacatcatattcagcccatcacgctgtggtttgatgatgcgctcagtgccatgcgttcgctgaaaggcatcggtgccacgcatcttcatgaagggcgcgacccgcgaatattaacgcgttcgcagttgcagcgattgcaactggcctggccgcaacagcaggggcgatatcctctgacgtatcatctttttttgggagtgattgctcgtgagtaaacgttattttgtcaccggaacggataccgaagtggggaaaactgtcgccagttgtgcacttttacaagccgcaaaggcagcaggctaccggacggcaggttataaaccggtcgcctctggcagcgaaaagaccccggaaggtttacgcaatagcgacgcgctggcgttacagcgcaacagcagcctgcagctggattacgcaacagtaaatccttacaccttcgcagaacccacttcgccgcacatcatcagcgcgcaagagggcagaccgatagaatcattggtaatgagcgccggattacgcgcgcttgaacaacaggctgactgggtgttagtggaaggtgctggcggctggtttacgccgctttctgacactttcacttttgcagattgggtaacacaggaacaactgccggtgatactggtagttggtgtgaaactcggctgtattaatcacgcgatgttgactgcacaggtaatacaacacgccggactgactctggcgggttgggtggcgaacgatgttacgcctccgggaaaacgtcacgctgaatatatgaccacgctcacccgcatgattcccgcgccgctgctgggagagatcccctggcttgcagaaaatccagaaaatgcggcaaccggaaagtacataaaccttgccttgttgtagccattctgtatttggttaaattgcgagcgagatcgcgtcttcgattgactgcaatttaaccaattaaattctaaaataatcacgaaaaaaattttacttccgcctcatgcggcgaatgtgggaattgcccaggcggcgggggataggggctggagacagttatccactattcctgtggataaccatgtgtattagagttagaaaacacgaggcaagcgagagaatacgcggcttgcacgcgaattggcgttaaagacggctcaaagaaatatcttttattttttaactggttagataaatgcaatggcagtcactgaacaggcatctcttgccataaaactgtcatcactcatcttgacaaatgttaaaaaagccgttgctttggggataacccggtaaggccggagttttatctcgccacagagtaaattttgctcatgattgacagcggagtttacgctgtatcagaaatattatggtgatgaactgtttttttatccagtataatttgttggcataattaagtacgacgagtaaaattacatacctgcccgcccaactccttcaggtagcgactcatgagtaaaccgttcaaactgaattccgcttttaaaccttctggcgatcagccagaggcgattcgacgtctcgaagaggggctggaagatggcctggcgcaccagacgttacttggcgtgactggctcagggaaaaccttcaccattgccaatgtcattgctgaccttcagcgcccaaccatggtacttgcgcccaacaaaacgctggcggcccagctgtatggcgaaatgaaagagttcttcccggaaaacgcggtggaatatttcgtttcctactacgactactatcagccggaagcctatgtaccgagttccgacactttcattgagaaagatgcctcggttaacgaacatattgagcagatgcgtttgtccgccaccaaagcgatgctggagcggcgtgatgtggttgtggtggcgtctgtttccgcgatttatggtctgggcgatcctgatttatatctcaagatgatgctccatctcacggtcggtatgattatcgatcagcgcgcgattctgcgccgactggcggagctgcaatacgctcgtaatgatcaagcattccagcgtggtactttccgcgttcgtggcgaggtgatagatatcttcccggcagaatcggatgacattgcacttcgcgtggaactgtttgacgaggaagtggaacgattgtcgttatttgacccgctgaccgggcagattgtttccactattccacgttttaccatctacccgaaaacgcactacgtcacaccgcgcgagcgcatcgtacaggcgatggaggagatcaaagaagagctggccgccagacgcaaagtgctgttggaaaacaacaaactgctggaagagcagcggctgacccagcgtacccagtttgatctggagatgatgaacgagctgggctactgttcggggattgaaaactactcgcgcttcctctccggtcgtggaccgggtgagccaccgccgacgctgtttgattacctgcctgccgatgggctgctggtcgtcgatgaatctcacgtcaccattccacaaattggcggcatgtatcgcggtgaccgggcgcgtaaagagacactggtggagtacggcttccgcctgccatcagcgctggataaccgtccgcttaagtttgaagagttcgaagcattagcgccgcaaaccatctatgtttcggcgacgccgggtaattacgagctggaaaaatccggcggcgatgtggtggatcaggtggtgcgtccaaccggattgcttgacccgattatcgaagtgcggccggtggcgacacaggttgatgatcttctttcggagattcgtcagcgagcggcaattaacgaacgcgtactggtcaccacactgaccaagcggatggcggaagatcttaccgaatatctcgaagaacatggcgagcgcgtgcgttatcttcactcagatatcgacaccgtcgaacgtatggagattatccgcgacttgcgtctgggtgagttcgacgtgctggtagggatcaacttactgcgcgaaggtctggatatgccggaagtgtcgctggtggcgatcctcgacgctgacaaagaaggcttcctgcgttccgaacgttcgttgatccagaccattggtcgtgcggcacgtaacgttaacggtaaagcgattctctacggcgataagatcaccccatcaatggcgaaagcgattggcgaaaccgaacgtcgccgtgagaaacagcagaagtacaacgaggaacacggaattacgccgcaaggcttgaacaagaaagtggtcgatatcctggcgctggggcagaacattgccaaaaccaaagcgaagggcagaggaaaatcgcgcccgattgttgagccggataatgtgccgatggatatgtcgcctaaagcgttgcagcagaaaatccatgagctggaagggttgatgatgcaacacgcgcagaatctggagttcgaagaagcggcgcaaattcgtgaccagttgcatcagctgcgtgagctgtttatcgcggcatcgtaacaggatagcgaagaagactgatgacaaacggaaaacagcctgatgcgctacgcttatcaggcctacattttctccgcaatatattgaatttgcgcggtttgtaggccggataaggcgttcacgccgcatccggcataaacaacgcgcactttgtcttcaataggaagccggaattttccttcggatttccgttaacctaaagcctgtaacgccttttccagcgcgttatgtaacaactggcggtcatgacgatacggaatatcgctggcctccagtacctcctggatcacaatccgctctttcaccgccgagacatccacttttggcccgacgatgaccgcatcaatgacctttttaccaacatactgctccataattgccagcttgctttccagcttcaaattagccgcaggtaaactcaactcacgccccagattgccgatataaaccatcggcgctggcgtgcggcgtaatgcctgggcgatttccttcagcagcagaattggcatcaggctggtataaaaactgccaggcccaataatgatgagatccgcttcattgatagcgtgaaccgcctcacgcgttgcgggtacattaggcgttaacaataactcttgaatcggcgtagttaactggtcgatattgacctcgccgtaaacttcatgcccctgatcgtcaatcgccatcagatcaacaggatgctctgacattggaatcaaatgcgtatccactttcagcagattacgaattaaattgatggcttccagaggccgcacgctaaggtgatccagcgcctttaacatcaagtttccgagattatgaccggaaagttcgccattgccaccaaaacggtattcaaacatcgcggaggcgacgctcggttccgttatcagctggttgaggcagttgcgcatatcgccccaggcaatgccgccttctgaacggcgaatacgccccgtcgagccaccattatcggtggtggtgacgatacccgttaaacgagaacccaaagacgaaagtgatgagagaacgcgtcccagtccatgccctccgccgagagcaacgacacgatcaagatcagccagcgtacgattgcgcatatagtttcctggagtcagattatccgcgctacagtagcgcaaattgcggggaaacagcaattaacctgccaatattgaggatacaaactattttcttctacctctaaaggacgatgcacgctatgcctccctgatgatgtatatcaaagtaaaaccgccattttcccttattctgtagcgaaatagcacgatcatgacgctatatacatgattacatagcgaaagtgtggatggtaaaaatctcatttacacgctagtatcggcataaccactaaacactctagcctctgcacctgggtcaactgatacggtgctttggccgtgacaatgctcgtaaagattgccaccagggcgaaggaagaaatgacttcgcctcccgtatctggaaaggtgtacatggcttcacaactgactgatgcatttgcgcgtaagttttactacttgcgcctgtcgattaccgatgtgtgtaactttcgttgcacctactgcctgccggatggctacaaaccgagcggcgtcaccaataaaggctttcttaccgtcgatgaaattcgccgggttacgcgcgccttcgccagactgggcaccgaaaaagtgcgcctgacaggaggagagccgtctttacgccgcgactttaccgatatcatcgccgctgtgcgggaaaacgacgctatccgccagattgcggtcacaaccaatggttaccgtctggaacgcgatgtggcgagctggcgcgatgcgggacttactggcattaacgtcagtgtcgacagtctggacgcccgccagtttcacgctattaccgggcaggataaattcaaccaggtcatggcagggattgatgctgcatttgaggccggttttgagaaggtcaaagtcaataccgtgctgatgcgtgatgttaatcatcaccagctcgacacctttctgaactggatccagcatcgccctatccagctgcgtttcatcgaactgatggaaacgggcgagggcagcgagctcttccgtaagcatcacatctctggtcaggttctgcgtgacgagctactgcgtcgcggctggatccaccaattacgtcaacgcagcgacggtcccgcgcaagtcttttgccatccagattacgccggagagattggccttatcatgccgtatgaaaaagacttctgcgccacttgcaaccgcctgcgcgtttcctccattggtaaactccatctctgcctgtttggtgaaggcggcgttaacctgcgcgatctgctggaagacgatacccagcaacaggcgctggaagcgcgtatttcagcggcgctgcgggagaagaaacagacccatttcctgcatcaaaacaacaccggtattacgcaaaacttatcgtacattggcggctaaaacgtcaaaaggagagatcagatgagtcaggtaagcactgaatttatcccgacccgtattgctattcttacggtttctaatcgtcgcggtgaagaagacgatacctccggtcactatctgcgcgattcggcgcaagaagcgggccatcacgttgtcgataaagccattgtgaaagaaaaccgctacgctattcgcgctcaggtatctgcgtggatcgccagcgacgatgtacaagtggtattgattacgggtggtactggcctgacggaaggtgatcaggctcccgaagcattgctgccgttgttcgaccgtgaagttgaaggttttggtgaagtgttccggatgttgtcgtttgaagagattggcacttccacgttgcaatctcgtgcggtagcgggcgtcgccaacaaaacgctgattttcgccatgccgggttcgaccaaagcgtgccgtaccgcatgggaaaatatcatcgcgccgcagctggatgcccgtacgcgtccgtgtaatttccatccacatttgaagaaataagtatgtcgcaactgacccatatcaacgccgctggcgaagcgcacatggtggatgtctccgccaaagcggaaaccgtgcgtgaagcgcgggcggaagcctttgtcaccatgcgcagcgagacgctggcgatgattattgatggtcgccaccacaaaggcgacgtatttgccactgcgcgtattgccggtattcaggcggcaaaacgcacctgggatctgatcccgctctgtcatccgctgatgctcagcaaagttgaagtcaatttacaggccgagccggagcacaatcgggtgcgtatagaaaccttatgccgcctgaccgggaaaaccggtgtcgaaatggaagcattaaccgcggcctccgtggcggcgctgaccatttatgacatgtgcaaagcggtgcaaaaagatatggtgattggtccggtacgtttgctggcgaagagcggcggcaagtcgggtgactttaaggtggaagcggatgattaaagttctttttttcgcccaggtgcgcgagttggtgggaacagatgcaaccgaagtggctgcggatttcccaactgttgaagcgttacgccagcacatggctgcgcagagcgatcgctgggcgctggcgctggaagatggcaaattactggctgccgtcaaccagacgctggtgagttttgaccatccgctgactgacggcgacgaagtagctttcttcccgccggtaaccggaggttaagatggcagaaaccaaaattgttgttggtccgcagccgttcagcgtaggagaagagtacccgtggctggcggagcgtgacgaagacggtgcggtagtcacctttactggtaaggtgcgcaaccataacctgggcgacagcgtcaacgcattaaccctcgaacactatccggggatgactgaaaaagcactggcagaaattgttgatgaagcgcgtaaccgctggccgctggggcgcgtcactgtgattcaccgcatcggggaattatggccgggcgatgaaatcgtttttgtcggtgtcaccagtgcgcatcgcagcagtgcgtttgaagccgggcagtttattatggattatctcaaaacccgcgcaccgttctggaagcgcgaagccacgccggaaggcgaccgctgggttgaagctcgggagagcgatcagcaggcggcaaaacgctggtagttttttgttagccggataaggcaccgctgcgtccggcaatttcaccgctcagtacatacgtttacgctgcgtcgatgcacagcctcatcattttgcagtatccttaagatattccttatatcttcaggagatcgtcatggacagattcccacgttctgattcaatcgtacaaccccgggctggcttgcaaacttatatggctcaagtctatggctggatgaccgttggcttgttgctgaccgcatttgttgcctggtatgcggctaattccgcggccgtgatggagctgttgttcactaaccgtgtctttttaatcggtctgatcatcgcgcaattagcattggttattgtgttatcagcgatgattcaaaagctgagcgcaggtgtaacgacgatgctctttatgctttattcggcgctgacgggtcttacgctttccagtatattcattgtctataccgctgcttctatcgccagtactttcgtcgttactgccgggatgttcggcgcaatgagcctgtacggttacaccacgaagcgcgatttaagtggctttggcaatatgctgtttatggcgttaatcggcattgtgctggcatcgctggtcaacttctggttgaaaagcgaagcattgatgtgggcagttacctacatcggcgtgattgtctttgtcggattgacggcgtatgacacgcagaaactgaaaaatatgggtgagcagattgatacccgcgacacgtcgaacctgcgcaaatattccattcttggcgcgttaaccttgtatctggacttcatcaacctgttcctgatgttgttgcggatcttcggcaaccgccgttaattctttttcaccatcactatcccggccatgtgtcgggatttttttcttactaaaaacgacacttaacaagtaccaggtataaaatatgccttatggacgagcggaagcgttttctgtatccataaatgcaaaagtattttgtatgcgtggttttaaatttattgatggtgaatattaatattttttctaaggataactaaaagaatggaatcatactcgcaaaacagcaataaattagattttcagcacgaggccaggatattaaacggtatatggctcattaccgctttaggtttggtggcaaccgcaggactagcctggggagctaagtatatcgaaattacggcaaccaaatatgattcaccaccaatgtatgtcgccatagggttattattactttgtatgtatggcttaagtaaggatatcaacaagataaatgccgccatcgcgggcgtaatatatctgtttttactctctttggtggcgattgtcgttgcaagtttagttcctgtatatgccattatcatcgtgttcagcactgcgggcgcgatgtttttaatcagtatgctggccggtttattatttaatgttgatcctggttctcaccgttttatcattatgatgacgttgacagggttggccctggtaatcatcgtgaatgcggcattaatgagtgaacggcccatttggataataagttgcttaatgattgtgttatggtcaggcattatctcgcatggacgaaataagctccttgaattggcggggaaatgccatagtgaagagttgtggagtccggttcgttgcgcttttacaggtgcattaacactctattactattttatcggcttctttgggatacttgccgcgatagctataacgcttgtctggcaaaggcatacgcgtttttttcattagccgtaaatgcacatactaaagaacttaactaaacttcacatcgccgcttcatttttcgcccgtagcttcttcgcctggctttccagcaacaggtaacagatcagcgccagcagcagtgggataaagtaatacagcacacggtaagcgagtagggcggcgataattgtacctttggaggtatgctccccagccagtagtgcgataaacaccgcttccagcacaccgatccccgccggaatatgcacgatgacgccagcaatactactaaccagtaacacgcccagtacaaagaaatagttcacgctttgaccaagtaacagccagataatcgcccccattaccatccagttaacgctggaaatcagcatctgagcgagggcgaatttccatgaaggcagcaccagcttttgccctttgatggtcatatggcggtgcttcgcgaaagcgcaaaaccacaaataaaccgcgataatcatcagtaagccaatgccgagaatacgcagcgtagtttgatcgacataccagtgatccggcaactccaccacgcctgcggtaaagataatccctgccagtaaaatgtagcccagccagttggtggtaatactgagcgagaaaatccgcgtaatagtgctaccgggcaaccccagacgagagtacaaacgatagcgcataccaatgccgccgacccaggtactgagcgtcaggttgaaggcgtagcagataaacgacaccagcatcacctggcgcttcgccagtttgtgaccgcagtaaaagcgggcgagcaggtcatagcagccgtaaatcagatagctgacgaccaccagcccgaccgcactaagcagcgcaacgcgattgtagtcgcggatgaccttccagacctcttcccagtccacttttttggcgtagaccaccagcaacacaatcaccgcgataaaaaacagccaggtgaggatcttctttgctaagcgccagcgcgggtgtgatttactcatcagggttttacccccgtgttttcagtttctacccgatcctgcgtttccattgtcggttgtgcgggcggatcaacctgcgccagacgtggcgtgtgtgccggaagccagccaaccagcgccgggaagtggcgtaaaaagtggaacgccagcacgcttttggtcaggttccaccaggtgcgtttgggcagcatggtttcatccacctgctgacaatctgcggcaataatgccgttcagattatcgcgcagcgtctggttaaaatgacgatcgtggatgatgacatttgcttcgagattcagtgacaaactgagcggatcgagattactggaccctactgtcgcccagtgatcgtccatcaatgccactttgccgtggagcgggcggcggcggtactcaaaaacctgaacgccgcctttaaccagatagttatacagcaagcgcgcaccgactctgacaatcggcatatccggttcgccctgaatgatcagtttgatccgcaccccgcgccgtgccgctttacgcaaggcgtgtaaaaatcgatagccggggaagaagtaggcgttggcgataatcacttcccgccgcgcctgagtgagcattttcaaataatggcgttcaatatcatcgcgatgttcttcgttatcgcgccagaccagcaatacctgcgcttctcccggctggcggttctcttccgctttgtgatgacgtcgccaccagcgtcgtgccgcgctctgtccaggcaggttttccagctcaaactggagaatatcttcgacaatcggcccttcaaggcgtaccgcgtaatcctgtttagcctctggaccgtagctggacatatgctcggcggagtaattcagcccgccaataaaggctatacgcgcgtcgatcaccacaattttgcgatgcatccggcgaaacacattggtgcgcataccaaaaaggcgagggcggggatcgtagtagcggaacactacgccagctgccgtcagttcattgacaaactcatcgctgagatccggcgaaccgtagccatccagcaagacttccgctttaaccccgcgttgcgctgctgccagtagtgccgcatgcagttgtttgccgacgtcatcctcaaaccagataaacgtttcaagaatgatgcgttcttgtgcctcgccaatcgccttaaacaccgcgggataatattgctcgccgttttccagcaactggatcttattgccttcgcgccagctacatttcataaatgaatctccgcacttaaaggggcatgatcagaaaggtgtcgccatgtccgcagcggcaacgcggttggcgcgctggcgctggcatttttgacgtagatcctgtccagtcgtagtagaggaaattgcaccggaaacgtgcgcgccgggcgtccgtgggcgcgggtaaaaatctcatccagtccggcctgcacttttaacggatgattagctttttgccgccagtcattgaaatcacccgccaccaataccggttcgccgtccggtagctcattcacccattcggcgagcatcgcaagctgcgcctgacggtgcgcctcacgcaggcccagatgtacgcacatcacatgaatcgcttttccggtcatcggcggcacaatgcggcagtagagcacgccgcgcttttccgcaccatcgaccgaaacatcgcgattctcataatgttcaatgggataacgcgacagtacggcgttgccgtgatgcccttccgggtatacggcattgcgaccgtaggcaaaatcgctccacatagtgtcggcgagaaactcgtagtgcgaggtatcgggccagttttccacatgcagcggatgaacttcgtgcgcgcccatcacttcctgcaggcaaacaatatcggcgctgacggtacgcacggcgtcgcgaagttccggcaaaatgaagcgtcggttaaacgcggtaaagcctttgtgaatattgatggtgagcaccttgaacgaaaattgttgtgtttgatcgggcataattttcctgtctttgcctcttatctcattgaaatagtgtagtcggcgtcacaaaaaggtgcggtcttacggaattttccgtaaagttcggtactctgagtaagtagagataaattcttcaggagagaagccatgaagtggcaacaacgtgttcgtgtcgcaacgggtctaagttgctggcagattatgttgcatttactggtagtggcgctgctggtggtgggctggatgagtaagactctggttcacgtcggcgtgggattatgcgcactgtattgtgtcacggtagtgatgatgctggtgtttcagcgccaccccgagcaacgctggcgtgaggtggcagacgtgctggaagagctgaccacgacctggtattttggcgcagcgctgattgtgctgtggctgttgtcccgcgttctggaaaacaactttttgctggcaattgcagggctggcaatccttgccggcccggcggtagtgtctttgctggcgaaagataagaagttacatcaccttacgtctaaacatcgcgtacgccgctgaccctgtcgtggccgttatcaccagtagcggccacaaactattccacacaatatccagactcgcatccttcaaataaatctgcttggtaatgtccgtaaagtggcgaatagggttaatccacgtcaggttttgcagccataccggcatgttttccaccggagaaacgtaaccggaaaggagaatggcgggcatcataaagacaaacacgccgataaacgcctgctgttgtgttgaacagagtgatgaaatcaacagaccgaatcccaccagcgataaaccataaatcaccatcgtaaagtagaacagcgccagcgatccggcgaaggggatttgatacgcccagataccaatcgccagcacaatggtggcctggaaggtggcgacaattaacgccggtacggctttgccgatgaagatctgccaggtggtgagcggcgaaaccagtagctgatcgagcgtaccttgttcacgttcgcgggcgacggaaagtgaagtgacgatcattacgccgatagtggtgatcatggcgatcagtgacggcaccacaaaccatttgtagtcgagattcgggttataccagttgcgtaccaccagctcgctgttgttaggtttcggttttccttccagcagctcctgctgataatttttgacgatctgttgcaggtagttggcggcaatttgcgcactgttggagttacgcccgtcgaggatcaactgcaaaggcgcggtctggaaggtatccagtttgcgcgagaagtcagccgggaaacgcaccagtagtaacgccttttgtgtgtcgatggttgggcggatctcctgtgggcttttcagcagcagcacatgagtaaaggcgctggcgcgggcaaaacgttgggtcagctccaccgaatgctcgccgttatcttcatcgtagatggcgatggtggcgttagtcacttccagcgtggcggcgaacgggaacaggatcacctgaattagcacgggtaaaatcagaatcgcgcgggtttgcggttcgcgcagcaacgactgcaactctttgcggattaacgtccataagcgatgaaacatgctcttctccctaatccagccgacgtttggttttcagccacgtcaggccgataaacatcaccgccgaagcgatcaaaaacagcacgtttaccaccagcaccactggaatattcccggcgaggaacaggctttgcagggtgctgacgaaataacgagcgggaataatgtacgtcaccgcgcggatcaccgcgggcatactgtcgatctgaaaaataaagccggaaagcataatcgacggcagaaaagcggcgttcagggcgacctgagcggcattgaactggttgcgggtaatcgtggaaatcagcagccccatccccagggtactgagtaaaaacaggctggagataaaaaacagaatcagcagcgacccgcgatacggcacgccgagaataaacactgacaccagcatacacagcaacatcgccagcatcccgagaaagtaataagggatcagcttacacagcagcagttccgtgcgggtaatctccgtagagagcagagcctccatggtgccgcgttcccattctcgcgccaccaccagcgaggtgagaatcgcgccgatgaccgtcatgataatggtcaccgcaccggggataatgaagtgctggctaatcgccgccgggttaaaccagtagcgggtttgtacatcaataagcggttcaaaagtctgcccgttgtcctccgctcgctgcatttgccagatctgccagatcccttcgacatacccctgtacaaagttagcggtattcggctcactgccgtcggtgatcacctgaatcggtgcggtggcgttggcgcgctccatctgttccgcaaaatccaccggaataaccaccagaccgcgaattttccccgcctgcattttggcgatcagttcctgacggttatcgctgatggtggcgtcgatgtagggcgaaccggtcatggtgtgggtgaaatccagcgccgcttcgctacgctgttccagtaaaatcccgacccgcagcttgctggagtcgaggttaatgccgtaaccaaaaataaacagcagtagcagcgggatcactaccgcaatcagccagctactcggatcgcgaacgatctgccgcgtctctttaacgcacagcgcccgtacgcgacgccaggacaggatcgggttactcattgctatgctccttatcccagtcgtggatcaactgaataaaggcttgctccatggtgggatcgggttgctcatcgttagccgactgtgctttcaaatcgtccggcgtgccgctggcgattaatttcccgcggtacaccaggccgatgcggtcgcaatattccgcttcatccataaagtgggtggtgaccatcaccgtgacgcctttctctaccatgctgttgatgtgcagccaaaattcacggcgggtgagggggtcaacgccggaagtcggttcgtcgagaaacagaatgtccggttcatgcatcagcgaacaggccagcgccagccgctgtttaaaacctaatggcagttcatcggtggcgtgggaggcgatacttttcaggccgaacgcctcgctcatgcgggagattttttcgttctgcgcccgaccgcgtaagccatacacaccagagaaaaagcgtaaattctgttcgaccgtcaggttaccgtagagcgaaaatttttgcgccatatagccgagatgctggcgcgctttaccggaactctctttcagatccatccccagcaccagcgcctggccggaagtcggcaccagcaaaccgcacatcatcttaaaggtggtcgatttacccgcgccgtttggccccagcaaaccaaaaatctccccacgtttaacggcaaagttgacgtgatcggtggcggcaaaatccccaaatttcttggtcagttctttcgcttcgatcaccgtctcgccgggtgtgccttctaccgtatgtaatattgcgcccagcggcgattccgaggttccggcaccgcccagcaaatcaataaacgcatcttcaaaacgcggcgtagtttcgttgatgttgatttccggcatcccgtcggcatggcgaatatcgtctggtgtggcctcttttttgaggatcagacgtaccgatttcccctgaatcatgccgtcgctgacctgcggcagtttcaaggcgcgttgcaacagtttgcggttgccctcgtgtggactggtcatcagaaagctgcgtccggccatggtttgtgtcagggcttttggttctccctgatacagcaactcgccttcgttcatcagtaacacgtcacggcactgctcggcttcgtcgagatacgaggtactccagaggattaacatcccttcgcccgccagctcatgcaccatctgccacagttcgcgccgtgagatagggtcaacgccgacgccgggttcatcgagcagcaacactttcggttcgcccaccagggtacaggccagaccgagtttttgtttcatcccaccggagagcttgcccgccaggcgtccggtaaacggcccaagagacgtaaactccagcaggcgagcaaaagtttgcttacgtgcctcgccggtgacgctgcgcaaatccgcgtacagattgaggttctccatcaccgtgagatcttcatacagaccaaatttctgcggcatataaccgagcacggcgtgcagcgcgccgtcgtttttgatcggatcaaagccaatcaccgtggcactgccgctgtcgggtttcagtaatcccgccaacatccgcatcagcgtggttttacctgcaccgtccggccccaccaaccccgtcacataaccggcgtgaatggtacaatcgagcggcgcgacggcgggcttgtccatgcccggaaagcgtttttccaggccgttcagcgtgataacggcatcattcatgtcctgcctcgtcaccgaattgtaccgtcactggcattccctggcgtaacgcatcatcggcgtcggtcaccacaatacgcaggcgatagacgaggtcggtacgcagatccggcgtttcgacggttttcggggtaaattcagcagtcggcgaaacgaaaccaatctgcccgtgatacggcttgtccgggcgaccatcggtataaagcagcactttgcgccccggctgggcctggtcaagattacgttcatcaacataagcgcgcacccacaccggacgcgttagtgaaacggtaaacaccgtgccaccttcattgaggaccgtgcctggctccaccgcgcgcgttaacagcgtgccatcagacggggctatcaacgttgagtcctgtaaattcaactccgcctgcgccagttgcgcctgcgcctgttcgaggctggctttcgcctgagcgatgtcctgttcacggttaccggaacggtactgacgcaatttatcctgtgctgatttcagcgttgcctgcgcctggtcgcgcgaggagcgggcattttccaggtcatttgccgaaatagtgcggcttttccacaacccttgctggcggttatagaagttctgcgcatagtcataggcggcttgcgcctgtttcaccgctgcggcggcctgagcgatttcttcattgcgatacccggcaagcatcaggtcatactgcgcctgtgccaccgaaacacccgctttcgcctgcatcagggcaatctcatacggcttgtgatccagttcgcccagcacctggcccgctttgatagcatcaccttcgtccaccgccagcgattcaacgcgccccccaacacggaaactaagatttaccgtacgaatatccacgttgccatacagcgtcaggccgttatcctggcggctttgataccaccagtagcctccggcaaccacggcggcaagtaccactaccgccaatccgatcacgacaggttttttcatcactacaaactcctttgcgataatccttgcaaaatcaggtcgatatgacaggtcaccgtctggttgatcagttcggtcttttcttcatcgaacgcggtccagccggtacgtaacagaattgtttctttgccaagacggaacgccagaatctcaccaatcaacgcatgggtatgaaggatcatgcgggtgtcattggcgtcgcagccggtccaggcggcaatcaggcgtgtcaggtggctgtgtagcggactaatcacctgttcgtgcaccaggtggtaggctgccgtgggagagagctgctcacgggagataaacttgctgaggttgacggtgtcatcctgggtgagcagcttaatcatgttcctgcaggcgcgaaggatcagttcacggatggcagcccgatcaggctgtggttgcgcgaacaagcgttcggcttcctcggcatgcggacggaactgctcgccaataaaatcggcaatccactgggcgcaggcgaggtacaaatcttctttcgaaccgaagtagtaggtgatggcagcgatattctgcccggcctgggcggctatctcgcgagtggtggcgttcattccatattcaccaaactgcgccagtgcggcagcaatcagctgttttttcgcctgttcacccttgattgtcatggcaggattattcatcgcacagtccattcttaatcaaatgattgattaagattatgactccataggggagttgtccagtatggctaagaattttagcaacgccagtcacagggataatttatgcgctgcgtcacaaaaactgctacactccgctccctcatgacattgtggtttttgtcattttccttttcagtatctccctgaaaactacaccggtaacggtcggggcggttcggagtagttatgtctttcgattctttgggtttaagccctgatatcctgcgcgccgttgccgagcagggttaccgtgaacccacccctattcagcagcaggcgatccctgcggtgctggaaggccgcgacctgatggctagcgcccagaccggcaccggcaaaacagcgggctttacgctgccgctgttgcaacacctgatcactcgccagccgcacgccaaagggcgtcgtccggtacgtgcgctcattcttaccccgacccgtgaactggcggcgcagattggcgaaaacgtccgtgattacagcaaatacctgaacattcgttcgctggtggtgtttggtggtgtgagtattaacccgcagatgatgaaactgcgtggcggcgttgatgtgctggtggcaaccccgggacgtttgctggacctggaacatcagaatgcagtgaagctggatcaggttgaaatcctcgtcctcgatgaagctgaccgcatgctcgacatgggctttatccacgatatccgtcgcgtgttaacaaaactacctgcgaagcgccagaacctgttattctccgcgaccttctctgacgatattaaagccctggcggaaaaactgttgcacaacccgctggaaatcgaagtggcacgccgcaataccgcgtctgatcaggtgacccagcacgttcactttgtcgataagaaacgcaaacgcgaattgctgtcgcacatgattgggaaagggaactggcagcaggtgctggtgtttacccgtaccaaacacggcgctaaccatctggctgaacagctcaataaagatggcatccgtagtgcggcgatccacggcaataaatcgcaaggtgcgcgtactcgtgcgctggctgattttaaatcgggcgatattcgtgtactggtggcaactgacatcgctgcgcgcggcctggatattgaagagctgccgcacgtcgtcaactatgaactgccaaacgtacctgaagattatgtccaccgtatcgggcgtaccggtcgtgcggctgctaccggtgaagcgttgtcgctggtgtgtgttgatgaacacaaactgctgcgtgatatcgaaaaactgctgaaaaaagagatcccgcgcattgcgattccgggctatgagccggacccgtcaatcaaagccgaaccgatccagaacggtcgccagcaacgtggcggcggcggtcgtgggcaaggtggtggtcgcggtcaacagcaaccacgccgtggggaaggtggcgcaaaatctgcaagcgcgaaacctgcagaaaaaccgtctcgccgcctcggcgatgccaaaccggcaggcgaacaacaacgtcgccgccgtccgcgtaaacctgccgctgcgcagtaatcttttatgccgggctatgcccggcatcaggctgatgaacaaacgcaaaactgcctgatgcgctacgcttatcaggcctacgtgaactctgcaatatattgaatttgcatgcttttgtaggccggataaggcgtttacgccgcatccggcatttcacaacaagcacttgtcagcaatttgagaacacgggaaaaaatttatctgttttaccgcccataagccaccgagacgttacttctctatagccaattgttcgcgcaactccattaaaaggtagcccagtcgattcttgcccttaccatgaccaccgtctccccagtaagcatcgttttccgtatgctcaaccagttttgcgggcgcggttgccagcaagagcgcacgcagttctgcatgctgttcgaatttagcgcgaagtgcttttcgcatcacctgttctttgaccgactcccagtttttacgcagaggcttagaacgatcgcgccccatgcgtgcggcgaccataggggaagaaacccgacggatctcttcgcggtatttttcatcaaggaatttttgtgcctgaaaatagtgttctgaggtaggccaggttttcccgtcaaccttgatgggccaggcggcaaagttagaaaaatcaccgtagtcatcgctggtgctgtagaaatttatgatggtgtcttgcatgacgtgttggatcctttgtgctcgaacgggcattaaaccgcattatgttggtggttattgcgagccgctttccagaaacagaaaaaccattacccctgaaaaccgaaaaatgccacaatattggctgtttatacagtatttcaggttttctcatggcattaaccgccgcgcttaaagcgcaaattgccgcctggtataaggcgcttcaggaacagatccccgactttattccccgtgcgccgcagcggcagatgattgcggacgtcgccaaaacgctggccggagaagaagggcgacatctggcgattgaagcccccaccggcgttgggaaaacgctctcttatttgattcccggcatcgccattgcccgcgaagagcaaaaaacgctggtggtgagtaccgccaacgtggcattgcaggatcagatttacagcaaagatttaccgctgctgaaaaagatcattcccgatcttaaattcactgccgcttttgggcgtgggcgctacgtttgtccgcgtaatctgacggcgctcgccagtactgaacccacgcaacaggatctgctggcgtttcttgacgacgaactgacgccgaacaatcaggaagagcaaaaacgttgtgcgaagctgaagggcgatctcgatacttataaatgggatggtctgcgcgatcatactgatatcgctatagatgacgatctctggcgtcgtttaagtaccgacaaagccagctgcctcaaccgcaattgttactactatcgtgaatgcccgttttttgtcgctcgtcgggagattcaggaagcggaagtggtggtggcaaaccatgcgctggtgatggcggcgatggaaagcgaagcggtattgcctgacccgaaaaatttactgctggtgctggacgaaggccatcacctgccggatgtggcgcgggatgcgcttgagatgagcgccgaaatcaccgcgccgtggtatcggctacagctggacttgttcacgaaactggtcgctacctgcatggagcagtttcgcccgaagaccatcccaccgctggcgatccctgaacgtttgaatgcgcattgtgaagagttgtatgagcttatcgcctcgttaaacaacattctcaatctctacatgcctgccgggcaggaggcagagcaccgttttgcgatgggcgaactgccagatgaagtgctggagatctgccagcggctggcaaaactcaccgagatgctgcgtggcctggcggagttatttcttaacgatttaagtgagaaaaccggcagccatgacattgtacgtctgcatcggttgattttgcagatgaaccgcgcgttggggatgttcgaggcgcaaagcaaactctggcggctggcttcgctggcgcaatcttccggtgcaccggtgaccaaatgggcgacgcgggaagagcgcgaagggcagctacacctctggtttcactgcgtgggaatacgtgtcagcgatcagctggaaaggctgctgtggcgcagtattccgcacattattgtcacctccgcaaccttgcgttcgctgaacagtttttcgcgtttgcaggagatgagtggtctgaaagagaaagcgggcgaccgttttgtggcgctggattccccctttaaccactgcgaacagggcaaaattgttattccccggatgcgcgttgagccttccatcgacaacgaagagcagcatattgccgaaatggcggcctttttccgtaagcaggtggagagcaaaaaacatctcggtatgttggtactgtttgccagcggacgggcgatgcagcgctttctcgactatgtgacggatttacgtctgatgttgctggttcagggcgatcagccgcgttaccgtttagttgaactgcaccgcaaacgcgtcgccaacggtgagcgcagcgtgctggtgggcttacagtcatttgccgaagggcttgatttgaaaggtgatctgctcagccaggtgcatatccacaaaatcgcttttccgcccatcgacagcccggtggtgatcaccgaaggggaatggctgaaaagcctcaaccgctatccgtttgaggtgcaaagcctgccgagcgcctcgtttaacctgattcagcaggttgggcgactgattcgaagccacggttgctggggcgaagtggttatctacgacaaacgcttgctgaccaaaaattatggcaagcgactactggatgcattaccggtatttccgatagagcaaccggaagtccctgaaggtatagttaaaaagaaagaaaaaacgaaatccccacgccgtcggcggcgttaatgatgtgagtcaggtaaggagtcgtaaatggactatcgcaaaatcattaaagagatcgggcgcgggaaaaaccacgcgcgcgatttagaccgggatactgcgcgcggtctgtatgctcatatgctcaatggtgaagtccctgaccttgagttgggcggcgtattgattgcgctgcgtatcaaaggagaaggggaagcagagatgctcggcttttacgaagccatgcaaaatcacaccatcaagctgacgccgccagcaggcaagccgatgccgattgtcatccccagttacaacggcgcgcgtaaacaggccaacctgacgccgttgttggcgattctcctgcacaaactcggttttcctgtggtggttcacggggttagcgaagatccaacccgcgtgctgactgaaaccatttttgaattgatgggtattacgccaacgttgcacggcgggcaggcgcaggcgaagctcgacgaacatcaaccggtgtttatgccagtcggcgcgttttgcccgccgctggaaaaacaactggcgatgcgctggcggatgggcgtgcgtaacagtgcacataccctggcgaaactggcgacgccatttgccgaaggtgaggcgctgcgtctttccagcgtttcgcatccggaatacattggacgcgtcgcgaagttctttagcgatatcggcgggcgggcgctactaatgcatggtactgaaggtgaagtgtatgctaatccgcagcgctgcccgcagatcaatctcattgaccgtgaagggatgcgggtgctgtatgaaaaacaggacactgctggtagcgagttactgccacaagcaaaagatccggaaaccacggcgcagtggattgagcgttgccttgctggcagcgaaccgattcccgaatcgctgaaaatccagatggcttgctgcctggtggctacgggtgaagcggcaactatcagcgacggcctggcgcgcgttaatcaggcattttaattcttttctcagccggatgagccatgtcatccggcttttaccccaccgcaatatgaaattcctgcatctttattgaccttcccacgcccggcgtgcagcataaaaatacaacaaacacataacataaacaggagttaaccatggaaagtggtcatcgctttgatgctcagacgctgcacagttttattcaggctgtatttcgtcagatgggtagcgaggaacaagaagcgaaattagttgccgatcatttaatcgcggcaaacctggcagggcatgattcacatggtattggcatgatcccaagctatgtacgctcctggagtcaggggcacctgcaaattaaccatcatgccaaaaccgttaaagaggcgggggcggcggtcacgctcgatggcgatcgcgcatttggtcaggtcgcggcacatgaagcgatggcgctggggattgagaaagcgcatcagcacggtattgccgccgtggcgctacataactcgcatcatatcggccgtatcggttactgggcggagcagtgtgcagcggcggggtttgtctctatccactttgttagcgtggtcggtattccaatggtcgcgccgttccacggtcgcgacagccgctttggcaccaatccgttctgtgtggttttccctcgtaaagataatttcccgctgttgcttgattacgccaccagcgccattgcatttggcaaaacccgcgtcgcctggcataaaggcgtccccgtgccgccaggttgcctgattgacgttaacggcgtgccgacgaccaatccggcggtaatgcaggagtcgccgttgggttcgctgttgacctttgccgaacataaaggctacgcccttgcagcgatgtgtgaaattcttggcggggcgctttccggcggtaaaacgacgcatcaggaaacgttacaaaccagtcccgatgccattcttaactgcatgaccactatcatcatcaacccggaactcttcggcgcgccggattgtaacgcgcagaccgaagcctttgccgagtgggtgaaagcctcgccgcatgatgatgataagccgattttgctaccgggcgagtgggaagtgaacacgcgtcgcgaacggcagaagcaggggattccactggatgcgggaagctggcaggccatttgtgatgcagcgcggcagattggtatgccggaagagacgttgcaggctttctgtcagcagttagccagctaaaaaaaagcccgtccagtggcggacgggcaaacaagggtaacataggatcaatgagggttagagcatatgcgtctgtcggcaaacagacagggaaatacttgtgctggacgtagcgtaaacgcctgatccgtccaacggttcggattttgtaggcctgataagacgcggtagcgtcgcatcaggcatctgttgccggatgcggcgtaaacgccttatccgtcctacgaattacttataaattaccgcagtaccgcttaatttattgttgttggtggcggaagtgatgctgtatccactggcaccggctgccgcggctttctcagccagtttcgcttccagggcatcgagggtggatgcgccatcggcagaaaccacgccgattttattcatgttctgtgcctgggatgccgttaccggttccgccgcgaacacgccaaatgacagagttgaaagagccatagcagcaacaacagtattgatagttttcataattaatctctcgcaggtgatttttgtataagtgacgttgtttcgtcgatgtgatgagtatcacgtttttttacgagagataaaatcgaagagaattgaccgccttgttcaaataaattgattgatatctaacctactgataaaccatttatttgttgtacttatgaacttgttttataccgcgtggcagtcacagcagcgttaaaggcacggaatgacacgcaaaatacaaattatactcgctatgcatctcgccagttgtagttaacgtaactggctgtctttcgaacctctgcgattatatcctgtataagctggtttttgtaaatctttctcctgctgacaatgaatacataagcgcacgccaggaatggcttcccgacgggcctgcgggatgggggcaccgcactcttcacattcatccaggctttcgccgcgcggaatttcaccccgagcgcgggcaatcgcatcttcaattgtactgttgatctgttcgttgacggcgtcatcgttagcccaaccggatgccatatcgacctccccatatcaatacttgtacagttaagtgtagctaatccagggacgaactcgggcagttcaagcatcagatctccgaccattcccgcagcagattatgataaagattaagcagcgacaggatctcttcactttcgccgtagcggcttttcagcgactgaatattgttgtccagttcaaacagcatggcgcgctttttatcatcgcggatcatcgactggatccacataaatgatgccactcgtacgccgcgggttacgggtgtcacgcaatgcaggctgctggagggatacaacacgagatcgcctgccgggagttttacccgatgttgtccgaaggtgtcattaacgaccagttcgccgccgtcgtagctttgtggatcgcttaaaaacagcgtggcagaaaggtcagtacgcatccagccgttttgtggatggctgcgtactgcgccatccacatggaaaccataggtttcattgttctgatagcgattaaacagcggcgtggaaagggtacgcggcaaggccgcggcaaagaataaagcatgttggttaaccgcgttcagcacctcattttgcagggcggcgtataacgtgctgcgggtgtcgacctgttgattgttcttaacttgcgcaccttgtgcgccggtggtgacgcgtccatccacccattcggcttgttccagttgttcgcgaaaacgagcgacgtcctgtggcgataacacgccgggaatgtggtacatcatacaatttctccaaaaagtggggcctgcgccccacatctgaatcagaaatgcatattggctgtgagcaagaaggttcttggctcgcccgggtgataacggtagccgctcttgttgattgaggcgacgtaatcggtatcaaacaggttgtaaacgtttagctggaagtcgagattgcgattaactcgataccccagtttggcatcggcgacccagtaaccttcggtaaacgctggcgttcccaccgcgccgtctgaacctttatgcatactgccgatatagcgtgcgcccgcgccaacagagatatcgtcggttgcctgatattggctccataaggtgaaggcgtgctccggggtatacggcagcgatgaggaaccatcctgggcaacatctttgccgtttttgatggttgctttttgctgggtatagccgccaatcacctgccacgcgggagtgatattcccggccacggatatctcatagccttcgacgcgtttcttaccgtattgcgagtaagttccgtcatcattttgctcaacttcattttcgatatcagtgcggaacagcgcggcggtgagcaacagacgtttatccagaacctgccatttggtgccaatctcgctggtgttggctttttgcggtttaaaatcggtgcggttggcactgttaccgctgccagactgcgcaagggcgaagttgttgccgcccggaggctgctgggaaacggcatagttaatatagacattgccgttttccgtcaggtgatacagcgccccggctttccagttcatcagattgcccgacttggcggtgtcgacggtggtgaccggagaaccttttgccacaccagttgggcaggtgatggcaccgcgtccgctgccgccgcaggcggtggcactgtcatattcagtatgataattatccagacggatcccgccgttcagctcaaaatcacgggtgatttgcagcgtatcaaaggcgtaaattgcgaaggtatccgtctgaccattggcgtttgcgccgttgcgcgtcaggccgccgggatgaatgctgctgtcaggatgataaatatttaccgcgggtaacgtcaccggattaacgccgtagttagtctgcgtttcacgggtaaattccacgccggtactgacatcatgaccgatagaaccggtatagaacgtcgaggtcaggttggtctggttggtgagaattttattactcacatctttggtattcgccgtgcgtgaccaggtccagctattcacatcgctggtgggctgagtaatattcgacgccccgcccataatcgccgtcatcaggtaatcctgctttacgcgcgaccaacgggtagtattgcgaatggtggtgttatcgttgatgtcgtgctcaaaacgcatggtggcggtgtcggtggtcgaatcgtcgtaatcggaatccgtgccgtaaaagttatgagtatcaacttttccggaatgattcagggccgccgttcccgcagatggggcagaatagcccggcaaaccgatggtcggaatgccgccgtctggcgtgttgtgctgggtgacatgcagataattaagatacaaacgattcgctgtaccaaggccaaaagcgacagaaggggcgacgccgtaacgctcatttttgactttgtcgcgtccggcatcgtgcgttttttcgcccattacattcaggcgcaccgcggtggtatcaccaatgacctgattgacgtccagcgtgccgcggcggaaccaggcgctgccaatactggcggaggcgtcaatgccggaatcattgcgcggctgcttgctgatcatattgatcgagcctgtcggtgcgctgcgcccgtagtcggtgccggacggccctttaatcacttcgacctgctcggtattgaaggtgtcgcgcgagacgctgccgatatcgcgaatgccatcaatataaatactgttagaggtatcggcaccacgcatataaatggcgtcgccagtggtggagttaccgttctcacccgcaaaaaacgcacccacgccggggacgtttttgagcgcgtcggtaaggttggttgcgccctgatctttaatcacttgttcagaaattaccgtcatcgtgcgggtagtatccgctaccggacgcgagaatttcggatcggcagattgttgtggcgcataaagcgaaggcgttgatgcttcgacaaccagcgtgtcatccgcgttagtttgcccttcggcggcgagtgcctgagccacaggcgtgatgccaatacaaagaccggcaaagaacgtgagcgaatgaaattgtctggcagggaaattgcgattgttttccattttgcaggtgactttttcttatatgttgaaattttcactgccacgagaaagcctctctgcggatgcgatgccactgttaatcccgtgatagtgctcgtgaaagtgataataattttgataagcattatcacttggagcgattttctatcacccattgcgcgaaaaagaaatacatttatttacattgagttcatatttgatgttttttgattacaaaacagacgaaaactgcatccagaggcgaatgcagttacgttggtggggttatttgtagatggttgcagtaccgaacatctggtcatttccgcctgcggaattaatgacataacctttcgcgccttgttcgcgcgctttttctgccagtttatcctccagatcgcttaggtttgatgcgccagttgccgaaacggtaccggcgggccgtagctgaccgctgtccaggttactcatcggttgcgcggcataagccgtgagagagattccgctcaggacggtggcaatcagtagtgtgaggcactttttcataatgacatcctcataaatacaacgggtagtgcctgataagtgtaggtcgcctgcgcgatgcaaatgacgcaaaaaattgacagagatgtgcttattttttgaacgatatatttttacaaaataagacaaatcaatgacatgcataatgctgatttttatgatgaattgccataaaccatagccatgttaaggttttggggaatgataaacgcagccagatatttaccctgtcgcgttatgcgggtatcttacgccgctgcttaaaggagaatgctatgtccgcccagaaaccggggttgcatccgcgcaaccgtcatcacagccgctacgatctcgccacgctttgtcaggtcaatcctgaactcaggcaattcctcacgcttacacccgccggggagcaaagcgtagactttgccaatccgctggcggtgaaggcgctcaataaggcgttgctggcccatttttacgccgtagcgaactgggatatccccgacggttttctctgcccaccagtaccgggccgggcggattatattcatcaccttgccgatttactggcagaagcaagcggaacaattccagcgaatgccagcattctggatatcggcgttggtgcgaactgtatttatccgctgattggcgtacatgaatatggctggcgttttaccggtagtgaaaccagcagccaggcgttaagcagtgcgcaggcgattatcagttctaatccggggcttaaccgcgccattcgtctgcgtcggcaaaaagagagtggggcgatttttaacggcatcatccataaaaacgagcaatacgacgcgaccttgtgtaacccgccattccacgattccgccgctgcggcacgggcaggtagtgagcgtaaacgccgtaacctggggctgaacaaagacgatgcactgaactttggcggccagcaacaggagttgtggtgtgaaggcggtgaagtcacctttatcaaaaagatgattgaagagagcaaaggcttcgcgaagcaggtgatgtggtttacatcactggtatctcgtggtgaaaacttaccgccgttgtatcgtgccctgacggacgtgggcgcggtgaaggtggttaaaaaagagatggcccaggggcaaaagcagagtcgctttattgcctggacctttatgaacgacgagcagcgccgccgttttgtcaatcgccagcgttaaagcgttggttcccccggcggtaacggttcagccggggtcgcgcccggagcaggcagcacctgataagtctgcactggcgcgcgaacgcccgccaggtcgaaatgttttttcacctggctgtcgagggcaaagcgtaccgtccactgtttgagtggcagcgtggtgaacgaaacacgcagtgtaaacgcggtattgcttaagccgacaatcccggcaaaattcggttcaccaataatcagcccgcgaatttcttcgttttccattaattccgctaccgcatctttcagtgcctgattggctttatcagcatcttcatggcgatcaacatcataatttgccaccaccgaaccaatgccgcggacaaagttagcaaaggtggttatcgaagaccacggaatgatgtgatacgccccggtatcctgtcgtacgcccacggagcgaatcgacatccgttccactgtgccggtcaacggcccgatagtcaccaaatctccagtgttcatgccgttttcaaactgaataaataccccggtgataatatctttcaccagcgtttgcgaaccaaacgagatagccagacctaatgccccggcacctgccagcaatggcgcgatattgacgccgatttccgacaacacaatcatgatggtgatggtactgataatcaccgccagcgcgttacgaaacagcgtaagcagggtacgcgtgcgggcgctgggtagcgggcggccatgaatatccgaagccagccggttttcgatcaaactggcgagcaccgtccagccaaccgccgagaagaaaagaatgagtgcgatacggatcaggatatctacggttttctgccccgcgccgttttgcagccagttccagaaatcgaacaatccccatgcgctcaacagcaacattaccgccacgcagactgtcagaatacgcgccgttttcagcgccgccgacagccagccattcaaccgtttttgcagctccggatagttacgctgagtatgtggcgagagagtgatggttttcgccagccagcgggaaaacataccggaaacaaacgctgcgataccaataatcgccaggctgcgcaccgttgcacccatcataaatttcaggctgttgcccggatcgaacaacgaaaagaaaaacagcacgataaaataggcgcttgccagccagtgccacaccagcgcaaaggcgcggataaacaggctgaaaaaggccagcgaatgctccgcgaagttgagcaaatgctgggtaatctcttttttattacgaaagatcaggtacaacgcccagacggtcatgcacagcataatgatgacgttcgccagcgcacctatctgtacattcacctgattagagataatcggcacggccacaatcaggccataacctatcaaactgcttaaccagctcaggcgacgactccagtaacgggcgctctcgtcctgaatcgtgaacgggcgcagctccgccacgtttgggcaaaaaatcaggcgtagtacggctttgaaaaattcaatgagggcaaaggcgttgagaaacaaactttgttggaaagcgatggtgcgactgcctgcattcaggttgtcgcttaatacctggccgacaaataatgtcagggccagtaacagcaggtcgataataaacgccccgataatcatcgccggaagctgcaaccagttgctgcgctcacgatttttttgccgcgcccactgacccattttgcgatacagcggcagtgcgcacaggcgaatcagccagtaaaaaccaaacactaataccgctaacattgaaaaatgggtcagcgcattgctgaaggtttgtggattaaacggcttatgcggggagccggtgatattgcgataaagttgcccgaagcgggcggaaagggcttcaccataatggcggctgacttcggtgaccttttgcagcacggtttgctcttcgaccagcgtcggcggcactatttttggtaccggttcagcagggggcgtagcggcaacggtgcgcaactggtcgatcaactctttacgcgaggtgtcattatccagcacatccgccagtgcgccataggccgcttttttttgttcgatatccggttccggggccggttcagtcgttgagtccgttgtcgttgtggttgtaacgccgggtatggataccgcgtgggcaggtgcgcccagcaggcagaagaggatgaacaggatccaccgcatgactcctccagtgagaaaatagagcaaaaagataagtatagatgctggaggaggggcgattttaaatgagaggaatctggtgtgcctccctttcgggtgaaagggaggaagggatattaagcaggttgctgacaacgtgcgggcttttttgccggatgcggcgtgaacgccttatccgtcctacaagttcatgcaattttaataagttgccagatatcctgtaggcctgataagcgtagcgcatcaggcaatgtgtcttattaagagacgtgctgcaaaaattcctgcaagcgctggctcggcgggttcttgatcaacacctgcggattgccatcttccgcaatccggcctttgtcgataaagatcagccgcgaagctactttctcggcaaaaccgatttcgtgggtcacgatcaccatcgtcatcccttcttcagccagatcctgcataaccttcagcacttcatggcgcagttccgggtcaagagcggaagtcggttcatcaaacagcatcattttcggcttcaccgccagcgcgcgggcaatcgccacacgctgctgttgaccaccagaaagttcggaagggtagtgatgtgcacgttctgccagaccgactttcgccagcagctcacgtgccagtttttccgcctcttctttgttcgcgccacgcacgcgtagcgggccaaacatgacgttttccagcgctgtcagatgcgggaagaggtaaaactgctggaacaccatacctgcttcctggcgaatcaggcgctcgtcaactttcggatcgttaaccttcaggccatcgacaatcagatcgccggaggtgatttcttccagtttgttgatgcagcgcagcagggtcgatttaccggaaccggacggcccgataatcaccacgacttcgccctgggcaatgttcaaatcgatattgtgcagcacctgggttgggccaaagtgcttggagacgtttttaaattcaatcacaggattttcatccttctttccagacgacgcagaataaagctcagcaccagggtaataatcagatagaacaccgccacggcgctccagatctcaagggcgcggaagttaccggcaataatttcttgcccctgacgggtcagttccgccacgccgatcacaataaacagcgaggtgtctttaatgctgatgatccactggttacccagcggcggcagcatacgacgcagtgccagcggtaaaatgacgtagcgaatggtttcccaacgtgaaagaccgagcgccagtcctgcttcacgaaaacctttgtggatagacagcaccgcaccacgcgtgatttccgcaatatacgcgccggagttgatcatgatggtgaccaccgccgcagtaaatgggtcgatgcgtaagtcgttaaacgccatcggcagggcgaaataaataaacatcacctggacgacgataggtgtgccgcggatcacttcaataaagaccagcgcgacgtggttggctatccaacctccgaaggtgcgtgcaaaacctgccagcaatccgattaccagaccgcctgccagaccgaggaccgaaatccacagggtcattttggcaccttcaatcagaagcggaatggcaggccagatggcactccagtcaaactgcatatgttgttcctgttaccgtggtgtaaataatcaaattcagggtaattaatggccccggagcgggtttgcgcccctcaccctaatcctctccccataggggagagggaactgccagtgcgttttacaggtgtagcgttattatttcggttcagtaccgaaccattttttgtagatttcgttgtaagttccgttctcgcgcagggttttcaacgcgccgttgactttgtcacgcagctcgtcgctacctttcgggaacgcaataccgtattgctgcgcttccagagagtcacctaccgctttgaactgaccgttaccggcggttttgatgaagtacagaatgtttggcgtatcgtgcagaacggcgtctgcgcggttggtgcccagttccatataggcgttatcgatgttcgggaactgacgcagatctttagttttgatgtttgctttcgcgtaatcaacggagccagtaccgctcttcacagcaaccactttcccgtcgagatctttcacgcttttcacatcgttattgttagctttcaccatcactaacaggccgcttttgtagtagccgtcagagaaatcgatcgcttttttacgctcgtcggtgatggtaatgcccgccagcgccagatcgacgtttttggtttgcagtgccggaatgatcccactgaaatccatcggcttcagttcgtaatccagcttcagctctttagcgatggcagcccacagatcaacgtcaaagcccacatatttatcgccctgtttaaattcaaacggaacgaaggcggtatccgtcgcgacaactaattttttatccgcggcatgagaagaaaccgcaaaagccagggtcagtgcagccagtgaaacttttaatacagacttcatagcatttccttttttctatccacgggacgatcccctgcgtgacattcacatatatgaaaaaatcgtgccagttttgcaactccttgatttttcgagatgcggcaaaaacgtgatgcacgatttatagggcaataccctgaagatgcaccattctggggcaccaatctggtgcgctaaaattgtgcactcaacacagtgattatttagcgtaaaacctgatgaaaaaacaatctttatgtaacgattgtgtgatgatgtggatacaaaaaatttacttaatcagctggagatagcagatggatgcactaaataagtgcgttgaggtgggctgcaaaacaaaacggcctcctgtcaggaagccgcttttatcgggtactaaagttctgcaccatcagcgatggatttattcgatgttagactcgataaaccacaggaatttatccaggtcgcgagacgcggcggtcaggatatctgcggtgtcgtcatctttcgcttcgccaatcgctttgcgtacgtcattagcgacgattgcgtaacggtcagccagttctttcaggtgatcctgaacgttgtggatgtccagcgggtaacttttcagcggggttttgctgttgataacttgagtggtccccagagctacaccgcccagctgcactgcacgttctgccatggtatccagatgatcgatcagtgcggtgcggaagccatccagcatttcatgtacggcaatgaagttagcgccgcgcatgttccagtgcgcttgtttggtaatcaaagaaagatcaataaactggataacctggcgattcagcaactctactgttgcttttttctcgctgtcggagacatcgttgcgggtataaagcagattggtcgcttttgatttaactaatttagcggtactcataatttcatatcctcttgatgttatgtcccagtaattaacgagattaagtatagcaccggctatgtgttccgctattctggctgttcctatcacactaatagtggtaacaagcgtgaaaaacaaaactaataaagattcaatgagttagatatattgataagaacaattcttatttatctgctcgccaggaattttcggaataaatatgcttttgcataattcgatatataaagacggtgtagaggaaaagtagcgagaaattctgcatggttatgcataaccatgcagaaatgtaaatttaattaatgtctaattcttttattttgctctctttgcgtactgtcagcgtagaccccattgaagcggcgatgatagcgccgagcgccagtagctgtatgggtgtcagtgtttctccgaggaaaatcatcccggaaacggcagccagcgccggttccatgctcatcagcgtaccaaatgtccgtgttggcaaacgggtgagggcaatcatttccagcgaataaggcagagcggtcgagagaatagcgacagccagacccaatggaataaccgaccagtgccagagtgcttcaccagcctgaagcgctccaattggcacgaaaattaacgctgcaatcaacgaaccaattgccaccgtcgcagggccatgttccgctcctgcgcgttgcccacttaaaatgtaaatagcccaacaagccccggcccccagtgccagcgcacagccggttaaatcgacatgggaaacgtcttgccccagcggtagcaggaaccacagaccaagaaccgccagcacaacccagacgaaatctaccgggcgacgagaagagaacagcgccaccgccagtggtccggtgaactccagcgccaccgcaatacccagcggtactgtctgaatagaaagataaaaaagataattcatcccacccagcgaaacgccgtaaaacaacagcggtaaccgttgctctttggcaaagcgcagtcgccatggcttaaagaacgcgatgaggatcagcgttcctaatgccagacgcagcgcagtgacacccggtgcgcccaccagaggaaaaagtgacttagctaacgaggctccaccctgaatagacgccatggcaacgagcaatatgactattggtaaccagaccggcattttacgtaatgaaccaggcatcctttctcccacaaatatctagacttaagtaaagcgtggagtgtactggatatacccaatgctggttgagcatttgttgaaaaaattttcccccgttttgactaaaatgcgccaggattgatggaatcattagtctggtgattaggaataatctggatgaatgacagggaaaacatgcgtaatacttacgcagttctctgaaaaagtgatttaaatttagatggatagcggtgtatggaaacgttctgttacatgaaatggcccgttagacatcacaaatcgcgaagagtttcccattaatttttgatatatttaaaacttaggacttatttgaatcacatttgaggtggttatgaaaaaaattgcatgtctttcagcactggccgcagttctggctttcaccgcaggtacttccgtagctgcgacttctactgtaactggcggttacgcacagagcgacgctcagggccaaatgaacaaaatgggcggtttcaacctgaaataccgctatgaagaagacaacagcccgctgggtgtgatcggttctttcacttacaccgagaaaagccgtactgcaagctctggtgactacaacaaaaaccagtactacggcatcactgctggtccggcttaccgcattaacgactgggcaagcatctacggtgtagtgggtgtgggttatggtaaattccagaccactgaatacccgacctacaaacacgacaccagcgactacggtttctcctacggtgcgggtctgcagttcaacccgatggaaaacgttgctctggacttctcttacgagcagagccgtattcgtagcgttgacgtaggcacctggattgccggtgttggttaccgcttctaatcactttggtgatataaaaaatccgcctctcggggcggatttttgtttttaaggtttcgggtcgaaaatatcggttccgagatggttgtaatccaccttctgtaactggaagttggtgatgtatatcggcccggctttcttctcagatataaacgggtatttgatgttaatttccttcgctttaatccccgtccactgggagaaaaagcctaagaagtcattggctgagcggcgggctttaatcacacgatgcgctttatcgtcgctggaaatgaccataaaaggcacctggaaattttgctgatatttatcatcatgggcaaggtattgcacgtctttaccgcgctctttaaaggccagaccgtggtcagaaaagtaaaccagcgagaagctgctgccgctgttgcgtaactgatcgtacagcttgcgcagtaaatcgtccgtttgcgtcatggtatagagatagcacgacgtttctttcgattgcacaaaggtttcgtattttccttgtgtcctgtcgcaggcctgcggatgtgagcccatcagatgtagaacaatcagctgcggttgcgagtgctcttgcgccagcacttgagcggtcatatccagtaacgcttcgtctttggtgtttttatctgcttcaaaattaccttctttcaggaagtacacttcatctgctcgtttggcgatgctggcgatagcggtatcgtattcgccgatttgaccctggttggaaaaccaccaggtctggaagcccgcgcgatttgccagggtgacaaagttatcctgaaactgtggtttgccatcgacaacgcgattgagcgttaagccaagcgatttctgcgtggagccactggcggcaatgtagtcagcaaatatcaaaccgttaacgctgctggcaaacggggtattgtcccagtgaccgccaaaggcaccgagggcatcgcgacgcgcgctttcaccgatcaccaccacataggtctgatacttcggcttaacggcagtgaccgtccaggtatctttcattccggaaagttttgccatccgttcttgctcttcaatcacctcgttattattgacgatgacatccttagcaaaacgaaataccggatagccagtatctttcagtttaaatacgccaccccaggccaggttttgcacgggagcaacaaaaaatgtcgccacactgaataccagacacaggctgtcgaaggtattccagcgcgctttttcattctctttttttcgcctgattgctattacgccgagcgcaaaaataaataagccgaccaggtagctgtaccacggaaaaatcgtcaggatttcggtcgactcttccatattggtggagtgcaatgccagcaatgtattgaaattaggcgcgccgtaggcctgagcaaaagggaaataacaagccgccaccagcgaactgacaccgaccagaactttttgtacgcgaggcaatgttcgccatagcaaaagcaaaatagccgtaaacgcagcggtgtagagcaaactgaaggggtaacctaagccgaggttaattaatagcgactgtaaaaagtagaacgcagtccacgggctaaatacccggctacgggtaacaagcgattctttgagggttaaattcatatgccactatcgtaacaaacgccatgtgcttaccctggcgtcaagggtcaatacctgcaagagtgcgtgaagagtggaaaggggtccgcatccgcgagccgcaatatacgcagggctgcaagaagatagagcgagccgccgttcaggtcaactactgacgaacaaatcttttgcgaaggggattgcaaatccgacaaaaagtggggtttttcagaccaaaacgcgttatgcctgcatgaaagcaggagtgaagcggcgtaccgcgacgccgctatttatcggaaggtttatcttgctgcggtttgttgttgaccatatcgcacaacatagagagcagcattaaccgtactttaaagggagaatgactaaacacgcgcatacacctcttgaactcattcataagacctcctgacttgctaatcccgtcgatccttgagggatgattgcattacatacagatatagcacaggctatattatatagctattgctaaaacgttaattttttgtaccttcgcaactctggtttacaatgtgcgcacgaaatgagaacgctatgtatgcgtcaccataatgaggaagcacaatgagtcgtcgcgcaggtacgccaacagcaaaaaaagtgacgcagttagtgaacgtggaagagcacgttgaagggttccgccaggtcagagaggcgcatcggcgcgagcttattgatgattacgttgagctgatttctgacttgatcagggaagtgggggaagctcgtcaggtggacatggctgctcgtctgggagtttcgcaaccgacggtggctaaaatgcttaagcggctggcaaccatggggctgattgaaatgatcccctggcgtggcgtgtttttaacggcagaaggagagaagctggcgcaggaaagccgcgagcgacatcagatagtcgaaaatttcttgttggtgttgggcgtcagtccggaaatcgcccgtcgcgacgcggaaggcatggagcaccatgttagtgaagagacgctcgacgcttttcgtttgtttacccagaaacacggtgccaaatgagcctgccttttttacgcacgctgcaaggcgatcgtttttttcagttattaattcttgttggtatcggattaagctttttcgtgccctttgcaccgaaatcctggcctgctgctatcgactggcacaccatcatcaccttaagcggcctgatgctgctgaccaaaggtgtggagttaagcggttattttgatgtgctggggcgcaaaatggtgcgccgctttgctacggagcgtcggctggcgatgtttatggtgctggcggcggcgctgctttctacctttctgaccaacgatgtcgcgctgtttattgttgttccgctgactatcacgctaaaaagactgtgtgagatcccggttaatcggctgattatttttgaggcgctggcagtcaacgctggttcgctactgacgccaattggcaacccgcaaaatattcttatctggggacgttctggtctttcgtttgccggatttattgcccaaatggcaccgctggctggcgcaatgatgctgacgctcctgctcctgtgctggtgttgtttccctggaaaggcgatgcaataccatacgggggtgcaaacaccggagtggaaaccgcggctggtgtggagttgtctggggctgtatatcgtctttctgacggcgctggagttcaaacaagagctgtggggactggtgattgtggcggcaggctttgcgctgctggcacgtcgcgtggtgctcagtgtggactggacgctgctgctggtgtttatggcgatgtttatcgacgtccatttactgacccagcttccagcgttgcaaggcgtgttgggtaacgtgagtcatctatctgaacccgggttatggttaacggcaatcggtttatcgcaggtgatcagtaacgtgccgagtaccatattgttgctgaactatgtgccgccgtctttattactggtatgggcggtaaacgtaggtggctttgggttattacccggatcgctggcaaatttgattgcgctacgtatggcgaacgatcgccgcatctggtggcgtttccatctctattcaataccgatgctgttgtgggcggcgttggtgggatatgttttgttagttatactcccggccaactagggtctggcaaataaaaaaggcggattatgagtccgccttttgctttaagttttgaagattaattcagacgaaccggcatcccggagcggtttttaatcgcttcatcaagaacaacctggtcaacatctggctgaccggtcactgtctgcacgctcttcgtcagggtaattggcacaatttcctgaccttcaaactgggcttcggtggtagacagcgggttatggacttcaatataacggctgccgtctggctcggtggtcgcttttaccggctcatcaataaactgtacgcgggtaccgaccggtactttctcgaacaggaatttgatgtcttcgttacgcagacgcacacaaccatgacttacacgcaggccgataccgaagttggcgttggtgccatggatagcatacaggcgaccgatatagagtgcatacagccccatcgggttatccggacctgccggaacgacagccggaagcggttcgcccgcagcgcggtactctgcgtgcattttggcggtcggcgtccaggtcgggcctgcttttttacgctcaactttggtggtccagttgataggcgtatctttgcctaactgaccaatgccgatcggcagcacgataacggtgttggtccctttcggatagtaataaagacgcatctcagcactgttaatgacgatgccttcatgaacggtatccggcaggatcagctgctgcggaatgttcagtacagtaccgcctttcggcaggaaggtatccacacccgggttcgcttccatcatattggaaagccccatctggtactcggcggcaaaatactccagcggctgagtgttaccttcaggaatggtgatcacctgattctgaccaaccaggcgactcccgtcggttggcagaggataagttaccgcagaggcggtactgcaaaagccgacaacagcgaaggccgctgcgaataatgttttcaatttcatattcatgttaagcgagattttgtgcctggcaggccattgggttgagaatattagagtattggaagcgcattataagttcattccagctcacagtgaaatcagatgtgtacgaaatcacattttttgcctttggcttgagtgtagaccttaagcgaggagcaggatcttctttcagacttatggcataatgcgcggtttgtcatatctcttttcaggatacgcctgtgttagtttccagtaacgtcaccatgcagttcggcagtaagccgttgtttgaaaacatttccgtcaaatttggcggcggcaaccgttacggcctgattggcgcgaacggtagtggtaaatccacctttatgaagatcctcggcggcgaccttgagccgacgctgggtaacgtttccctcgatcccaacgagcgcattggtaaactgcgtcaggatcagtttgcctttgaagagttcactgtgctggatacggtgatcatggggcataaagagttgtgggaagtgaagcaggagcgcgaccgcatctatgctttgccggaaatgagtgaagaagacggctataaagtggccgatctggaagttaaatacggcgaaatggacggttactctgcggaagctcgcgccggtgaactgttgcttggcgtgggaattccagtggaacagcactacggcccgatgagtgaagttgctcctggctggaagctgcgtgtgcttctggcgcaggcgctgtttgctgatccggatattctcctgctcgacgaaccgaccaacaacctcgacatcgacaccattcgctggctggaacaggtgctgaacgagcgtgacagcaccatgatcatcatctcgcacgaccgtcacttccttaacatggtctgtacccacatggcggatctggattacggcgagctgcgcgtttatccgggtaactacgatgagtacatgacggcggcgacccaggcgcgtgaacgtctgctggccgataacgccaagaagaaagcgcagattgctgagttgcaatctttcgttagccgctttagcgccaacgcctcgaaatctcgccaggcaacttcgcgcgcgcgccagattgataaaatcaaactggaagaggtgaaagcctccagccgtcagaacccgttcatccgttttgaacaggataagaaactgttccgtaacgcgctggaagtggaaggtctgaccaaagggtttgataacggtccgctgtttaaaaatctcaacctgctgctggaagtgggtgaaaaactggcggtactgggtaccaacggcgtcggtaaatcaacgctgctgaaaacgctggtgggcgatctgcaaccggacagcggcaccgtaaaatggtctgagaacgcgcgcattggttactatgctcaggaccacgaatatgagtttgaaaatgatctgaccgtgttcgaatggatgagccagtggaagcaggaaggcgatgacgagcaggcggtacgcagtattctcggtcgtttgctgttcagccaggacgacatcaaaaagccagctaaagtgctttccggtggggaaaaagggcggatgctgtttggtaagttaatgatgcagaagccgaacattctgatcatggacgaaccgaccaaccacctggatatggaatccattgagtcgctgaacatggcactggaactgtatcagggcacgctgatctttgtttcacacgaccgtgagttcgtaagctccctggcgacccgcattctggaaatcaccccggaacgcgtgatcgactttagcggtaattacgaagattacctgcgtagtaaagggatcgagtaagtgattatccgtcaccccgatactgtcggggtgacggcggctgatgacaaatgcaaaatagcctgatgcgctacgcttatcaggcctacgcagtacctgcaatatattgaatctgcaggactttgtaggccggataaggcgttaacgccgcatcaggcattaacaaagcgcatttgtcagcaatctgagtaacgtcgaatcgattttcttaatcccacatcaattcacttccattaattctcaaacatccatgcccaacgctcgcttaccgtgaatgttgaggtcggcaagcgtaaagcgtccttcccagtttgtttcatagtcctcgcgcgggaagtcgcccggcgatgcgcctttttccagtgcggccttcaccttgtgcgcgtaggcaagatttttctcgcacatcggtgccgcaggaatgtacatcacgttgccccaaccttgttgattttcaacgggggcaacggaatggatgacgtcgcagtgccaccagacggagtctccggcttcgagttttggaatgctggttaacgcctcaatcaacagtggatgccattgctctgataccggcaatactcttccgggcgctacgccgcacagttcatcctccggcacatcatcaagcagcggacgtaacagtacgtacgccatagcttcaggaatgggcacgacgtgcagcagcccctgaccaggcagcatatcagagagcgctgtccagccctggaatgtccgaaacacggaacatttggtggtgttgtccaccgtgtactcttcaacttccgtacgatgtgccgcatgccagggatcatattgcgccagattgccattaaagacgttggcgaaaacgcgctgatacgctggaagcagccagcgttccagtgccccggagtcggtatgcgctccaagacctttggaggtcgttccgggcggacggcggcggatacggtcagggtagatgacgctcacatccgggttaaaccattgctttccatcactttcaaatgtccacagacgattgagaaacgactgcgcattcgccatttcttcactctggcgggcctgcatttgcgcctgcgaccagtagatggggtaaatctcgggacgtgaagcgctgagcgtcccgaagaaattatcgccggggcctttgtagacctcgtcaaagcggttgcggtccagatagtccagcatcgactgatcccagcctagcgcttgttcgcgggggaaatggccttttatcaccgcacaaccgcgacgtttaatctgttcgcgctgctctgcagtaacatgacctgctttgatatcggcataagacagcaccggccagacggcatcgccctgtgctttgagtgcgttgatttcagccactcgcgtggcaatgtcatcgcttagctgattaaagatctgctggacgtcgccaagctgcgcccgcagcgcgtgcttcatctgacggatagctgctttgtgatcggcaggcaatgtgtcgctggtaaaagtagaagccataaccacctctcattaactttcattcgaaaccattctgatttgcatgtgacaatataagttataaataagttaatgcaagtttaatgatttgatgtgatgtacaggatgtaaaaagaagggaaaaccggagcgcacggctccggtagagaggtcagctgttaaaaggggatgtgttatccagcaccgcctgaatcacattcagcgcgccttcatgattattatcatcggtagcgtaacgggcgatttgtttaatgttttccgcagcattgcccatcgcaaaggaataacgcgccattttcagcatctccgcatcgttaccgctgtcgccaatcgctaccacattttgcggtgacagatcccagcgtttcagtaaccgcgaaataccgtttgctttatgtagaccgggaataatcaggtcgataaagccaaaaccactggtaacgggtttcataatgccatcgagcgctacgtgcagtttgtcgatcactaacgggatttgttcatccggcaggttgagcgaaaacttgaacagtacgtcgtcaatctcctgataatcttttacaggtttcaggcgatggtagtgttttgccatcagtgcgacaaatgcttcgggggcattttcgctgacatatgcactttgcagaccgcaggcgacaaaattgagttgcttatcttttagcaactcgccaataacaatccgcgattcatgtcgggtcagttcgccgtggaacaactgcttgccatgttcgtaaaccagtgcgccgttttccgcgacaaaagagatctcatcctttagctcaggaaagaatgaaataagctggtaatactgattaccgctggcaacaacgaacttaatgccgcgctttttcagttcctgatattgcgccataaaacgtggttggttgtacgttttggcgtcgttaagaaaagtaccgtccatgtctgtgacgataacttttacgctcataggtgtgctcctggctcgaaaatgaaaccgtaacagtgtaataacaatgtgacgcagagcacaaattatatttcgaatgaaagtaaggatgaaattgatgatgtgaatgatttagcccggcgacgacgccgccgggccgaggagattacagcatatgttcagtacgggcgatgatatcgtcctgagcgtctggagagagcgcggtgaagaacgcggaatagcccgcgacacgcactaccagatcgcgatactgatcgggatgttttttcgcatccagcagcgtttcgcgggaaacgatgttgtactgaatatgccagcctttatgcacttcaaagaaggtacgcagcaggatcatcagtttctgcttgtcagattcgttctccagcgttgccggattcagtttctggttgagcaacacgccgccgagaatcgctgccgtaggcagtttacccactgagccaatgaccgcagtagggccaagatggtcagtaccggaggccgggcttgcgccttctgccagcggggtgtgggctttacgcccgtccggtgttgccatagtctgcgcgccaaacggtacgttagcggagattgatgacgtacccgcgtaatagttgccgccaaccggaccacgaccgtagcgcggattatggtactgtttcagttcgtcgatataggtctgataagcgcgagccagcagcgtatcgacagtatcatcgtcgttgccgtacttcggcgcaccgttaatcagccgctgacgcagctgctcgtgagtcaggccgtcgaagtcatctgccagtgcggcagcaagctgttgctgaccaatcgcaccttgttcaaacaccagtttcttcactgccgccaggctgttgccgaggttggcaatgccgacctgcaggccagaaacccagtcatatttcgcgccgccttgcttgatacttttcgctcgctcaatacagtcatccaccagcgccgagcagagaatatcgtgcacgttctcttccagcatggtgtcgacgacatattcgatttcgattgatttgcgggtgtagtaacggatttgcgtatcccacgcgtccatcacttcatcgaagttgttgaagttacctgccgacaacgctttttcttgtggcaggaacactttgccgctggtggcatcatgcccgccttccagcgccgccagcatcacgcgggcgaagttgataaagctcatgccggtacagcgatagccccatttgccaccgacggcggtttctatacaaccaatcgctgcgtagtcataagcgtcctgcggttcaataccgagtttaataaattccgggatcacgatttcgtcgttgttgaacgccggcatcccgaagccgcaacggatcacctgtacgcaggcgtcgaggaaatcgttgctcattcctgcatggtaacgcacgctgaggttaggctgagtggaacgcaggcgaccgcaggattcgaggatcgcgtaagagagtggattcaccgcgtccattggttgaccatcaaccagattttgcccgccaatagtgacgttctgatacagcggacttcccgcagaggcttttgagtgtgagccggagcggatcttgttcacttccagcagtttcagccagcagctatgcagcatctcgatggcgtgttcgcgatccagcgtctggttgagttcaacgtcgcggcgatagtacgggtagagatactggtccatacgaccaaacgatactgagtgaccgttagattcgatctgcaaaatcaactggatgaagtaacacagttgcagcgcctgccagaaagtctgcggcggctggtgggcgataagatcgcagttttctgccatcgccagcagttcatcgcgacggctttcgcgggtttcggtcgcggccatttcacgcgccagggcagcgaaacgttcaatgtgttcactgactgccaccagcacgatatcaatcgctttcaggaattgctcaccgtgtaaatcttccagcaccgtcaggttgatgcgcgagcgacgttccgctacttcctcgcgcagaccatcaagccctttttccagcagcagcgggaaattcaccgccaggtgcgcatcgccggaggtcatattgccttccgctttaatgattccggtcgccagcagacctttttgctcatcggtaaacatgccgtagcagcgatcctgtacggtctgaccgcgccaccacgggcacacttcatgcagaacgcgtttgttctcttcgctcaccgcaaagccagcaccgggacgatctgccagatcatcaatctctttttcgatccacgagacagtatattccgggaagatcggcgcggcgcgaacttcgcttgcctggttgccaatgatcaactcatcgtgtttgatccagatggtgcgattcgccaggtgatgcgccagtgccagcgcgcgacgtaccgggatcggcttatcgagatgttgttgatacatctcggtatagtgctgcgcgcgctcggtacagactggcggtttcacaatatgcaccagcgcatttttgtgcgctttaatgcggtcgctgagcgtgtccagtttcagtgtggtcatggttgttatcctcgtaaggtcgcggttaaccctttctggcaggcatactgctgggcaaagtcgagcagttctggcgcatcaagcggtttttccggggcgtcatagggcagattaagtaagtgatatttgttgatgcccagcgtgtggtagggcagaaaatgaatttcgccaacgtgcagctcgtcggcggcaaaatcggtaatggcttttacagaggtttcgtcggcattaaagccctgaatcagcggcacgcggataatgatttttttgcccgctgcggcgagttttttcaggttatccagcactctggcggcgttaccgtcggtccactgtttaaacggcgcgtcggcaacgtgttttaaatcggcaagaaacagatcgatatagggcagagaaggggcgatatatttccacggcacatgcagacaggtttctaccgcagtatgaatgcctgcctcgtggctggcttgcagtagcgccatcgccatttccggctgcataaagggctcaccacccgaaagcgttaaaccgccgccgctgcgatcgtaaaacggtttatcgcgcagaacggtcgtcatgatctcctcaacgcttttcacttcaccacacacggttaatgcctgtgtcggacagcagtcggttaacgccgtcagatgctccggggttaacttttcccgatgaataagcaaaccattcagcgcgcgctcaatcacttccggcgcggccttagcgcacagctcgcagccttccagacacagtcgtgcgtcatacagcagatcctgcgtgcgggcgcggctttccgggttctgacaccagcggcagcccagcgaacagcctttaagaaatacgaccgtgcggataccggggccatcatgggtcgagtagcgctgaatattgaaaatcatagttgcctctctatttcgttcaagcattaaaatactttcgaatgaaagttagattgatgtgcgtcaactgttcagagagttttcccgtgatagtctacattcagacaaaaagtacattttgaggatggttatggaactgtatctggatacttcagacgttgttgcggtgaaggcgctgtcacgtatttttccgctggcgggtgtgaccactaacccaagcattatcgccgcgggtaaaaaaccgctggatgttgtgcttccgcaacttcatgaagcgatgggcggtcaggggcgtctgtttgcccaggtaatggctaccactgccgaagggatggttaatgacgcgcttaagctgcgttctattattgcggatatcgtggtgaaagttccggtgaccgccgaggggctggcagctattaagatgttaaaagcggaagggattccgacgctgggaaccgcggtatatggcgcagcacaagggctgctgtcggcgctggcaggtgcggaatatgttgcgccttacgttaatcgtattgatgctcagggcggtagcggcattcagactgtgaccgacttacaccagttattgaaaatgcatgcgccgcaggcgaaagtgctggcagcgagtttcaaaaccccgcgtcaggcgctggactgcttactggcaggatgtgaatcaattactctgccactggatgtggcacaacagatgattagctatccggcggttgatgccgctgtggcgaagtttgagcaggactggcagggagcgtttggcagaacgtcgatttaaccggacgttctgcatcctcataaattgctgatgacgtggcggagtgccgcgtcttatcaggcctggaggtggcaattactgcccacacacctcacaccccggattacgcatcagtttcatttcgcgaaactgacaggtcatcgcatcgtacatgacgattttcccgctggccggtttgccataacctgccagcattttgatcgcttccattgcctgcaacgaaccaattacgccgatcaacggtgccattacgcctgcttccacgcaggttaatgcattttcaccaaacaaacggctaaggcagcgatagcacggttcaccgtcctgataagtaaagacggtgatttgaccttccatacgaattgccgcgccggaaaccagcggtaccttcgcggcaaaacagcctgcgttcagttgattacgtaccgcaacgttatccgtacagtcgagcaccagatcgtgttcagcaatcaatgctgcaagttctgcgtcatccagcagtgcattgactggcgtaatcgcgatatgtgggttgatccgcgtcagggcgtcacgggcggattccaccttcggttgcccgaccgtggcatcactgtgcagtgtctggcgttgcagattcgagagcgaaaccgtgtcgaagtcgagcagcgtcaggttaccgacaccggcgcttgccagatactgcgaggctgcacagccgaggccgcccaggcccactatcagcacgcgagaatctttcagcgcctcctggccgtcaaaatcaaagccgcgcagaatgatttgccggttgtagcgcagcatctcctgatcgctgagttccgccattacaggcctccgaacaacgcgttaaacggttctacttccacccattcgcccacttccacattgccgcgatcgcgttccagcacgataaagcagttgccgaggctaaaggagctaaatatatgtgaaccctgatgtccggtggtcgtcacttccagttcgccatcggcgttgcgttgcagcacgccgcgctggaaatcaagacgtcctggcgtttttttcaggcgggacgctgtgcgtacgcgctggcgcgcgggcaggccgctggcggtgttaccgcttagttttgccagcaaaggctgtaccagttgatagaaggtcagcgtcgctgaaaccgggttgcccggcaggccgcagaaccagctattgctgagtttaccgaacgcgaacggtttacctggtttaatcgccagcttccagaaggcgatctcccccagctcttcaagaatcgttttggtgtaatccgcctcacccactgaaacaccgccggaactgatcaccacatccgcctggctgtcggcttcaataaatgcggcgcgcagggcatggggatcgtcgcggataatccctaagttaattacctcgcatcccaactgttctaacatcaggtgtacggcgagacggttggtatcgtagatttggccgtcgcccagcggctgaccgggcaactggagttcatcaccggtagaaaaaagcgctacacgcactttacgaatcaccggaacttcggcaatccccagtgaagcaattactggcagctctgcggtagtcaggcgagttcccgccgggaaaacaaccgcacctgcagagatatcttcaccgcgacggcgaatattttgcccgctacgcacttcagcagtaaaacgcacgccattgtccatttgttcagtctgctcctgcatcaccaccgcttcgcagccttccggcaccggcgcaccggtcataatacgaatgcaggtacccgcaggccattcaccatggtatggctgaccggcaaaggatttaccggcaacgggcagcggttgcccggaggcaatatcggctaaacgcaccgcgtagccgtccattgcggagttatcaaaccccggaacatcaagcggcgaaacgacatcgctcgccagaatacgaccaaaacactgtaccagtggcagcgtttcctgggcggtcagtggggtgacgcgagaaagcatctcattaagcgcggtgtcgagcgacatcaatccggtggtaaattccatgaaaacactcctgcggaggcaaaatcgaatttgcctattatgtcagaaaaacgccacagactgtatgccacctcgggcgtagcgctgggtcctgcctttacatgccatatccatctttctatattcaaaaattgaatgagtaattcataaaaattctgatatttatagcaaaagtggcgaaccacccttaatggacgaatactatgggcaaagcagtcattgcaattcatggtggcgcaggtgcaattagccgcgcgcagatgagtctgcaacaggaattacgctacatcgaggcgttgtctgccattgttgaaaccgggcagaaaatgctggaagcgggcgaaagtgcgctggatgtggtgacggaagcggtgcgtctgctggaagagtgtccactgtttaacgccggaattggcgctgtctttacgcgtgatgaaacccatgaactggacgcctgtgtgatggatggtaacaccctgaaagccggtgcggtggcgggcgttagtcatctgcgtaatccggttcttgccgcccggctggtgatggagcaaagcccgcatgtgatgatgattggcgaaggggcagaaaattttgcgtttgctcgtggcatggagcgcgtctcgccggagattttctccacgtctttgcgttatgaacaactactggcagcgcgcaaggaaggggcaaccgtcctcgaccatagcggtgcgccactggatgaaaaacagaaaatgggcaccgtgggggccgtggcgttggatttagacggcaatttggcggcagccacgtccacaggcggaatgaccaataaattacccggacgagttggcgatagtcccttagtgggtgccggatgctacgccaataacgccagtgtggcggtttcttgtaccggcacgggcgaagtcttcatccgcgcgctggcggcatatgacatcgccgcgttaatggattacggcggattaagtctcgcggaagcctgcgagcgggtagtaatggaaaaactccctgcgcttggcggtagcggtggcttaatcgctatcgaccatgaagggaatgtcgcgctaccgtttaacaccgaaggaatgtatcgcgcctggggctacgcaggcgatacgccaaccaccggtatctaccgtgaaaaaggggacaccgttgccacacagtgatgaacttgatgccggtaatgtgctggcggttgaaaatctgaatattgcctttatgcaggaccagcagaaaatagctgcggtccgcaatctctcttttagtctgcaacgcggtgagacgctggcaattgttggcgaatccggctccggtaagtcagtgactgcgttggcattgatgcgcctgttggaacaggcgggcggtttagtacagtgcgataaaatgctgttgcagcggcgcagtcgcgaagtgattgaacttagcgagcagaacgctgcacaaatgcgccatgttcgcggtgcggatatggcgatgatatttcaggagccgatgacatcgctgaacccggtatttactgtgggtgaacagattgccgaatcaattcgtctgcatcagaacgccagtcgtgaagaagcgatggtcgaggcgaagcggatgctggatcaggtacgcattcctgaggcacaaaccattctttcacgttatccgcatcaactctctggcgggatgcgccagcgagtgatgattgcgatggcgctgtcatgccgcccggcggtgctgattgccgatgagccaaccaccgcgctggatgtcactattcaggcgcagatcctgcaattaatcaaagtattgcaaaaagagatgtcgatgggcgttatctttatcactcacgatatgggcgtggtggcagagattgccgatcgggtactggtgatgtatcagggcgaggcggtggaaacgggtaccgtcgaacagatttttcatgcaccgcaacatccttacacccgtgcgctgttagctgctgttccgcaacttggtgcgatgaaagggttagattatccccgacgtttcccgttgatatcgcttgaacatccagcgaaacaggccccccccatcgagcagaaaacggtggtggatggcgaacctgttttacgagtgcgtaatcttgtcacccgtttccctttgcgcagcggtttgttgaatcgcgtaacgcgggaagtgcatgccgttgagaaagtcagttttgatctctggcctggcgaaacgctatcgctggtgggcgagtctggcagcggtaaatccactaccgggcgggcgttgctgcgcctggtcgaatcgcagggcggcgaaattatctttaacggtcagcgaatcgataccttgtcacccggcaaacttcaggcattacgccgggatattcagtttatttttcaggacccttacgcttcgctggacccacgtcagaccatcggtgattcgattatcgaaccgctgcgtgtacacggtttattgccaggtaaagacgcggctgcacgcgttgcgtggttgctggagcgcgtgggcctgttacctgaacatgcctggcgttacccgcatgagttttccggcggtcagcgccagcgcatctgcattgctcgcgcgttggcattgaatccaaaagtgatcattgccgacgaagccgtttcggcgctggatgtttctattcgcgggcagattatcaacttgttgctcgatctccagcgtgatttcggcattgcgtatctgtttatctcccacgatatggcggtggtagagcggattagtcatcgtgtggcggtgatgtatctcgggcaaattgttgaaattggtccacggcgcgcggtcttcgaaaacccgcagcatccttatacgcgtaaattactggcggcagttccggtcgctgaaccgtcccgacaacgaccgcagcgtgtactgctgtcggacgatcttcccagcaatattcatctgcgtggcgaagaggtggcagccgtctcgttgcaatgcgtcgggccggggcattacgtcgcacaaccacaatcagaatacgcattcatgcgtagataacattcaggcggagaataaaatggcaagagctgtacaccgtagtgggttagtggcgctgggcattgcgacagcgttgatggcatcttgtgcattcgctgccaaagatgtggtggtggcggtaggatcgaatttcaccacgctcgatccgtatgacgcaaatgacacgttatctcaggccgtagcgaaatcgttttaccaggggctgttcggtctggataaagagatgaaactgaaaaacgtgctggcggagagttataccgtttccgatgacggcattacttacaccgtgaaattgcgggaaggcattaaattccaggatggcaccgatttcaacgccgcggcggtgaaagcgaatctggaccgggccagcgatccggcgaatcatcttaaacgctataacctgtataagaatattgctaaaacggaagcgatcgatccgacaacggtaaagattaccctcaaacagccgttctcagcgtttattaatattcttgcccatccggcgaccgcgatgatttcaccggcagcgctggaaaaatatggcaaggagattggtttttatccggtgggaaccggaccgtatgaactggatacctggaatcagaccgattttgtgaaggtgaaaaaattcgcgggttactggcagccaggattgcccaaactggacagcataacctggcgtccggtggcggataacaacacccgcgcggcaatgctgcaaaccggtgaagcgcagtttgctttccccattccttacgagcaggccacactgctggagaaaaacaaaaatatcgagttgatggccagtccgtcaattatgcagcgttatatcagtatgaacgtgacgcaaaagccgttcgataacccgaaggtccgtgaggcgctgaattacgccattaaccgtccggcgctggtgaaagttgcctttgcgggctatgcaacgccagctactggtgtggtaccgccaagtatcgcctacgcgcaaagttataaaccgtggccttacgatccagtgaaagcgcgcgaattactgaaagaggcgggatatcccaacggtttcagtaccacgctgtggtcgtcacataaccacagcaccgcgcagaaagtgctgcaatttacccagcagcagttagcgcaggtcgggattaaagcccaggtgactgcgatggatgccggacagcgggcggcagaagttgaaggtaaagggcaaaaagagagcggcgtgcggatgttctacactggctggtcggcttcaaccggcgaagcggactgggcactatcgccgctgtttgcctcgcagaactggccaccgacgctgtttaataccgcgttttacagcaataaacaggtggatgacttcctggctcaggcactgaaaactaatgatccggcggaaaagacccgcttatataaggcggcgcaggatatcatctggcaagaatcgccgtggatcccgctggtggtagaaaaactggtgtcggcacacagtaaaaacctgaccggtttttggatcatgccagacaccggcttcagctttgaagacgcggatttgcaataagcaacgcagggagtggaatgcttaattacgttatcaaacgcttactggggttgattccgacgctgtttatcgtctcggtgctggtgtttttatttgtccatatgctgcccggcgatccggcgcgattgattgccgggcccgaagctgatgcgcaggttatagaactggtgcgtcagcagctggggttggatcagccgctgtatcaccagttctggcactatatcagcaatgctgtgcagggggattttggcctgtcgatggtgtcgcgtcgtccggttgccgatgagattgccagccgctttatgccaacgctgtggctgaccataaccagtatggtctgggcggttatatttggtatggcggcgggaattatcgccgccgtctggcgtaaccgttggccggatcgattgagtatgaccattgcggtgtcggggatctcgtttccggcatttgctctggggatgcttttaattcaggtattctccgttgaactgggctggctgcctaccgtgggagcagacagttggcagcactacattttaccctccctgacgctcggcgcggcagtggccgccgtgatggcgcgctttacccgcgcgtcgtttgtcgatgttttaagcgaagattatatgcgtaccgcgagggcgaaaggggtgagcgaaacctgggttgtcctcaaacacgggctacgtaacgcgatgatcccggtagtgaccatgatgggcttacagtttggctttttgctcggtggttccatcgttgtggagaaagttttcaactggccgggacttggacgcttactcgttgactccgtagaaatgcgtgattacccggtgattcaggcggaaattctgcttttctcgctggaatttattcttatcaacttagtggtggatgtgctttacgccgccattaacccggctatcaggtacaagtaaggatgcgactatttaactggcgacgtcaggcggtgttaaacgccatgccactggtcaaacctgaccaggtacgtacaccgtggcatgaattctggcgacgatttcgccgtcagcatatggcgatgaccgccgcattattcgttattttattgattgtggtggccatttttgcacgctggatcgctccctatgacgccgaaaattattttgattatgacaatctgaataacggaccttctttgcagcactggtttggcgtcgattcactggggcgtgacattttcagccgtgtcctggttggtgcgcaaatctcgctggcggcgggcgtgtttgccgtgtttatcggtgcggcgatcgggacgttgctgggcttgctcgctggatattatgaaggctggtgggatcggctgatcatgcgcatttgcgatgtgctgtttgccttcccgggtattttactggcgatcgctgttgttgcggtgttgggaagcggcattgctaacgtgattattgcagtcgccattttttccatccccgcgtttgcccgcctggtgcgcggcaacacgctggtgttgaaacagcaaacctttattgagtcagcacgcagtattggtgccagcgatatgaccgttttgttgcgtcatatcctgcctgggaccgtctcttctatcgtggtgtttttcaccatgcgcattggtacctcgattatctctgccgccagcctctcatttctcggcctcggtgcgcagccgccgacaccagagtggggagcaatgctcaatgaggctcgagcggatatggttatcgcgccgcatgtcgctgtttttccggccctggctatttttctgaccgtactggcgttcaatttgttgggcgatggtttacgcgatgcgctggatccgaaaattaaaggatagttacgtttgaatattgcttgaaagggtaatcacctcacaggaaattattgccctaagcaagtgttgtaactttctgctgattttgtagaatcgggtaatttggttaaaaagccgcagcaagggacaatttttgcagcggcacagcgttcagatagttattttgttaaatgtattaacatgctgagtttatacgaaaagataaagataaggctgataattttatttttattggcagcactgtcatttattggtctttttttcatcattaactatcaactggtatcggagcgcgcggtaaaacgtgccgatagccgctttgaacttattcagaaaaacgttggctatttctttaaagatattgaacgttcggccctgacattaaaggactcactgtatttattaaaaaatacagaggagattcaacgcgccgtgattcttaaaatggaaatgatgccatttttagactcggtgggactggtacttgatgataataaatattatcttttttcgcggagggcgaatgataaaatcgttgtttatcatcaggaacaagtaaatggaccgcttgtcgacgagtcagggcgggttatttttgccgattttaacccatcgaaacgaccgtggtcggtggcttcagatgactctaacaacagctggaatccggcatacaattgctttgatcgtccgggtaaaaaatgtatctcttttacgctacacatcaacggcaaagatcacgatttgttagcggtggataaaattcatgtcgatttaaactggcgatatctgaacgagtatcttgatcaaatcagcgctaatgatgaagttctatttttgaaacaaggccatgagatcattgccaagaatcaactcgctcgtgaaaaactgattatttataatagcgaaggtaattataatattattgattctgtcgatactgaatatatcgaaaaaacatcagcggtgccaaacaacgcattattcgaaatctatttttattatcctggcggtaatttattgaacgcatcagataaacttttttatctgccgtttgcgttcattattatcgtattgctggtggtttatttaatgaccactcgtgtgttccgtcggcaattttctgaaatgacagagctggttaatacgctggcgtttttgcctgactcaacggatcaaatcgaggctctgaaaattcgtgaaggcgatgcgaaagagattatcagcatcaaaaattcgatcgcggaaatgaaagatgccgaaattgaacggtcaaataaattgctctcactgatctcttacgatcaggaaagtggttttattaaaaatatggcgattattgagtctaacaataatcagtatctggctgtggggatcatcaaactgtgtggtctggaagccgtggaagcggtgtttggtgttgatgagcgcaataaaatcgtcaggaaattgtgtcagcgaattgccgagaaatatgcgcaatgctgcgatatcgtgacattcaatgccgatctctatttacttctgtgtcgggaaaatgtacagacatttacccgtaaaatagcgatggtaaacgattttgacagcagctttggctaccgcaatctgcgcatccataagtctgccatttgtgaacctttgcagggggaaaacgcctggagttacgcagaaaaactgaaactggcgatttccagtatccgtgaccatatgttctcagagtttattttctgtgatgacgcgaaactcaacgaaatagaagagaatatctggattgcgcgtaatattcgccatgcaatggaaattggcgaactattcctcgtctatcaaccgatcgttgatattaacacccgcgccattctgggcgcggaggcgttgtgccgttgggtgtctgcggagcgggggatcatttcaccgctgaagttcattaccattgctgaagatatcgggtttatcaatgagctgggttatcagattattaaaacggcaatgggtgaattcagacattttagtcagcgtgcgtcgctgaaggatgatttcttactgcatattaatgtttcgccctggcagttaaacgaaccacactttcatgagcgttttaccaccatcatgaaagaaaatggcctgaaggcgaacagcctctgtgttgagatcactgaaaccgtgatcgagcgaattaatgaacatttttatctcaatattgaacaactgcgtaaacaaggggtacggatatcgattgatgactttggcaccggtttgtcaaacctgaaacgtttttatgaaattaatccagacagcataaaggtggactcgcaattcaccggcgatattttcggtactgcgggaaaaattgtgcgcattattttcgacctggcacgctataaccggatcccggtgattgcggaaggcgtagagagcgaagacgttgcgcgcgaattaatcaaattaggatgtgttcaggctcaggggtatctgtaccagaaacccatgccattctccgcctgggataaaagtggaaaattagtaaaagagtagtttacgtatgtccagaatcaataagttcgtacttacagtcagtctgctgatttttatcatgatttcagcagttgcctgcgggatctacactcaaatggtaaaggaacgggtgtatagcctgaaacagtccgttattgatactgcttttgcggtggcaaatattgctgaatatcggcgtagcgtggcaattgatcttatcaacacgctaaatcccacggaggaacagctgttggttggtttgcgcacagcttacgccgactcggtttccccctcttatttgtacgatgtcggtccttatctgatttccagtgacgaatgtattcaggtaaaggagttcgagaaaaattattgtgcagatattatgcaggttgtgaagtatcgacatgtcaaaaatacagggtttatctcttttgacggtaaaaccttcgtctattacctctatccggtaactcacaatcgtagtctgatatttttgcttggtctggagcgtttttctttactgtcaaaatcgctggcgatggacagcgagaacctgatgttctctctatttaagaacggtaaaccggtgaccggtgatgaatataatgctaaaaacgccatcttcaccgtttcggaagcgatggagcacttcgcctatttgccgaccggattgtatgtatttgcgtataaaaaagatgtttatttgcgggtttgtacattgattattttctttgccgcattggtggcagtgatatcgggtgccagttgcctctatctggtacgcagagtgattaatcgtggtattgtggagaaagaagccatcattaataaccattttgaacgcgtactggatggcgggcttttcttttcggctgccgatgtcaaaaaactctacagtatgtataactcggcgttcctggacgacctgaccaaagcaatgggcagaaaatcctttgacgaagatttaaaagcgctgccggaaaaaggcggttatttgtgcctgtttgacgtcgataaattcaaaaacattaacgacaccttcggtcatttgctgggcgatgaagtgttgatgaaagtggtgaaaatccttaaatcacagatcccggtagataaaggtaaagtctaccgcttcggcggtgacgaatttgcggtgatttatacgggtggaacgctggaagagttgctatcgattctaaaagaaatcgttcatttccaggtgggaagcattaatttaagtaccagtatcggtgtagcacattcaaatgaatgtcctaccgtcgaacgcttgaaaatgctggcggatgagcggctgtataagagtaagaaaaacggcagggcacagattagctggcagtaatcattattcgcaggccggacaaatgattttgcccggcctgaattaattaaacccggctaccccacaaatcgtactcatcggcgtgctcgactttcacacgcaggatatcacccggcttaacgttggtttcaccattgagataaaccgcgccgtcgatttccggtgcatctgccatgctgcgaccaatcgcgccttcttcgtccacttcgtcgataatcaccagaatttcacggcccactttctcttgcaggcgctcggcggaaatctgctgctgcagctgcatgaaacggttccagcgttcttctttaacttcttccggaacctggtcaggcagggcattggcgtctgcaccttcaaccgggctgtatttaaagcagccaacgcgatccagacgcgcttctttcaggaagtcgagtagcatctggaaatcttcttctgtctcgccagggaagccgacaataaaggttgagcgtagggtcagttccgggcagatttcgcgccactgtttgatgcgcgccagttggcgatctacagaacccggacgcttcatcagtttgagaatgcgcgggctggcgtgctgcaacggaatgtccagatacggcaggattttgccttctgccatcagtgggatgacgtcgtccacatgcggataagggtaaacgtagtgcagacgtgtccagatccccagtttcgataactgttcgcacaggctgaccatgctggtttttaccggctcgccgttgtggaagccagtacgatgtttaacatcaacgccataggcggaagtatcctgcgagatcaccagaatctctttaacgcccgcatctaccagacgtttcgcttcacttaacacttcgccaatcggacggctcaccaggtcgccgcgcatagacggaataatgcagaaggtgcagcggtgattacagccttcagaaattttcagataggcataatgacgcggcgtcagtttcacaccttgttctggcaccaggctcaggaatgggttgtgtttcggttttggcacgtagtgatgaacgtgctccagaacctgctcatagctatgaggcccggtgatttccagcactttcgggtggacttcgcggatctgatcttcttttgcccccagacaaccggtcacaataaccttgccgttttcattcaacgcttcaccaatggcttccagtgattcttgtaccgcgctgtcaataaagccgcaggtgttgacgatcaccatgtccgcatcgtcatagctcggtaccacgtcataaccttcagtgcggagttcggtgagaatacgctctgaatcaacaaggtttttcggacagccaagggaaacaaagccgattttcggctggggagttactttgctcatagcttaaaaaatattcagttacaggaaaggtcagggcagggattctacagagttctggataaaatttgtatcgcaatctcattcgctggcggaggcgaaggaaatgtaaattttgttaattcggcgtgaagaattgatcctggacagcattttgctcaaaaaatagccatactatttaattgcaacaaggctgggaagaggaggatcgaagtatgttcgttgacagacagcgaatcgatctgctgaaccggttgatcgacgcacgcgttgacctcgccgcatacgtgcaactgaggaaggcaaaaggatacatgtccgtcagcgaaagcaatcatctacgagataacttttttaaactgaatcgcgaactgcacgataaatcgctgcggttgaatcttcatctggatcaggaagagtggagtgctcttcatcatgctgaagaagcattagcgacagccgcagtatgtttgatgagtgggcaccatgattgcccgactgttattaccgtcaacgccgataagcttgaaaattgtctgatgagcttaacgctgagtatccagagcctgcagaagcacgccatgcttgagaaggcctgaaaactaagggggagaaagcgtctcccccttcatgtttaagtttttgtaaaaatgaatttgttatctcctccactgactacgctttaagccagagtcaatccggaggcgttatgcatcgacaatcctttttccttgtgccccttatttgtctttcttccgctctctgggcggctcctgcaacggtaaatgtcgaagtactgcaagacaaactcgaccatccctgggcactggcctttttacccgataatcacggtatgttaatcactctgcgcggcggcgagttgcgtcactggcaagcaggaaaaggattatctgcgccgctttccggagttccggacgtttgggcgcacgggcagggcggcctgctggacgtggttttagcgcctgattttgctcagtctcgccgcatctggttaagttattccgaagttggcgatgatggcaaagccggaactgctgtgggttatggccgcttaagtgatgatctctcaaaagtgaccgacttccgcaccgtctttcgccagatgccaaaactgtctaccggcaaccattttggcgggcggctggtattcgacggtaaaggttatctttttattgctctgggcgaaaacaatcagcgcccgacggcgcaggatctggataaattacagggcaaactggtgcgtctgaccgaccagggcgaaatcccggatgataatccttttataaaggaatccggtgcgcgcgccgagatctggtcttatggcattcgtaatccgcaaggaatggcgatgaatccgtggagtaatgcactgtggctgaatgaacatggcccgcgcggtggtgatgaaattaatatcccgcaaaaaggcaaaaactacggctggccgctggcaacctggggaatcaactattcaggctttaagataccggaagcgaaaggggagatcgtcgccgggaccgagcaacctgttttttactggaaagattcgcccgctgtgagcggcatggccttctataacagcgataaattcccccagtggcagcaaaaattatttattggcgcgctgaaagataaagatgtcattgtgatgagcgtcaacggcgacaaagtgacagaagatggccgtattttaacggacagagggcagcgaattcgtgatgttcgcactggacccgacggttatttatacgttctcaccgacgagtccagtggggaattacttaaagttagcccacgcaattagctaacgggaatcatcaccactttgcgcactgcggggcgttcagtgagttgctgataccagcgttgcagatttggacgcggtgtccaggtcaggccaacgttaaacaaattgtagatgaacggtgcgatagcgatatcgcccacaccaaactcgtcgccagagaaccattttacttttgccagttccgcatcgagcagggcaaacagggcgtcgcactctttgcaactggcatcaatggcggcctgatcgcgctcttccggtggtgttctgactaatcccatcaggatcccgcgatgagcattactgagcgtctggtttgcccagtccatccatttttccgcttccgcacgacgtgccggtgagtcgatccacaggcgtttttgcccgtactgtgccgccagatagcggacaatggcgtttgattcccaaagaatgagatcactttcgtcgtcacgcaacaacggcaccagcccgttagggttcatcgccagaaaatcagcatcgtgatttatcccaaactcacggcccgcgagaatttgctcataaggtagttccagttcttcgagcgtcagcaatactttttttacgttagttgaattattccgaccccacagcgtaatcatactcaccccttttccgacaggcagccacaggctgaacaggactccgatggtgaagtaaagttaacttttaagcaacagctggcaaaaaaatgacaccagaagcagcgaagcggcaggatattgcataaactttaaaaactttaccaacttacggtttctttaagtttgtgtgtgcgttattaatcaccaaacttatcatacggcgatataacgtattttttttgaatggatactcgggtggcatttatgacgcaatactcctctctccttcgtggtcttgcagcgggttctgcatttttattcctttttgccccaacggcattcgcggcggaacaaaccgttgaagcgccgagcgtggatgcgcgtgcatggattttaatggattacgccagcggtaaagtgctggcagaaggcaatgcggatgagaaactggatcccgcgagcctgactaaaatcatgaccagctatgtggttgggcaggcgcttaaggccgataagattaaactcaccgatatggtgacggtcggtaaagatgcctgggcgacgggaaatccggcactgcgtggttcatcggtaatgttcctcaaaccgggcgatcaggtttcggtggcagacttgaacaaaggtgtgattatccagtccggtaatgacgcctgtattgcgctggctgattacgttgccgggagccaggagtcatttattggtctgatgaatggttatgccaaaaaactgggtctgaccaacactaccttccagacggtgcacggcctggatgcgccggggcagttcagcaccgcgcgcgatatggcattgctgggtaaagcattgatccacgatgtgccggaagagtacgccattcataaagagaaagagttcaccttcaacaaaattcgtcagcctaaccgtaaccgtctgctgtggagcagcaatctgaatgttgatggcatgaagacaggaaccacggcaggcgcgggatataatctggttgcttcggctacccagggcgatatgcgtttaatctccgtagtgttgggggcgaaaaccgaccgtatccgttttaatgagtctgagaaattattgacctggggtttccgcttctttgaaaccgtgacgccaattaaacctgatgccacctttgtgactcagcgcgtctggtttggtgataagagcgaagtgaatctcggggcaggtgaagcgggctcagtgaccataccgcgtgggcagctgaaaaacctgaaagcgagttatacgttaacggaaccgcagcttaccgcaccgctgaaaaaaggtcaggttgtcgggaccattgatttccagcttaacggtaaatccattgagcagcgtccgctgatcgtgatggaaaatgtggaagagggcggattctttggtcgggtgtgggatttcgtgatgatgaaattccatcagtggttcggcagctggttctcttaatcttctgataaccggatggcgcgaaacgtcatccggttatacgtcattaatacatcaacttaatgcgctgcgtctgcgcgtacttcacatactcatcttccgggcaacaatcgctcaccacaatatcaaagcgtttcaggtcacccatgcgcgccggacgcaccttgccaaatttactgtggtcgacaaccagcacatgcttttgcgccatcgacatggcccagtgttttaccggcaactcttcaagattaaaacaggtagcgcctttactgacatgcacgcccgccgcagaataaaaagcgatatccgggcaaaaattattcagcgtttgctgaaaatcgatgggtttgaaaatggcgttgctggcgtgaaattcaccaccgcaaagaaacgcgcggcaatggggtttctctttcagcgccagaaaggtatttagcgaataacaaacggcggtaaaagggatttcattatcaatcgcttcaataatccacggcgtggtggtgccacagtcaaaaaagagggtctgatcgggttctaccagcgtcgcagccagttttgccgcccggcgtttttcttccaccaggcgggatttttgatcgcttaacaggtaatggctggcactgcgcggttccagaacaatatagccgccgagcaaaacgacgggcgcactgtggttgttcagatcgcgacgaatcgtcatctccgaaaccccaagcagggcggcggcgtctttaagatgtaacttatcgctgcgttttaattcttgcagcagctgcccgatacgctcttcgcgacgtgtttccataatccctctgaatagttattgaagcgagccgctcaatactacactttttagcagagatcagtcacgcacccagcctttgcggatcggtaatgcaaaacagacgcgataccacgattgcagacgttgatagagtttatgccccatcgcttgccagataatctgggcactaaggcagccaatcatacctgccagcaatccaccgagcatatccagcggccagtggacgccaagataaacgcgcgaccaggcaatgacgacggccagcaccattaaaagtgagccggaccacaggcgatgccagcataaaaatgccagtgcaaaggtgaaaatcaccgtaccgtgatcgcttgggaatgagtcatccgccgcatgatgcaggaagttatagccgatattttcgacaaagggtcggtcgtgcggaaaaagatgtcccatcgtccaggacacaaacaggctgaccgccagcgcgatagcgatttttatcaccagttgccgttgtgctgtaagcccccacaaccaaagtaccacggccagcaacggcaccacggtaatcaaatctttagcaataaaaatcgccaacgagatcatccacggagccgagtctggcgtcgcgttaataagagagaatagagagagattcaaattttccagcataacttcccgacgcaaagtgattaaaagggagccaatacaggcaagtcgttgagaataaagtgcaggttaaactgggtaaagcggcatcgtcttatttccctcaagcggcctgtttacggtgggtgattgtaacgggcataggttaaataaaacttaaagaaagcgtagctatactcgtaataatgtaagaatgtgcttaaccgtggtttcagctacaaaattcgctttctcgttagctgcgcttttattaaactctgcgcgattattattggcgaagaaattgcatgcaaaataaattagcttccggtgccaggcttggacgtcaggcgttacttttccctctctgtctggtgctttacgaattttcaacctatatcggcaacgatatgattcaacccggtatgttggccgtggtggaacaatatcaggcgggcattgattgggttcctacttcgatgaccgcgtatctggcgggcgggatgtttttacaatggctgctggggccgctgtcggatcgtattggtcgccgtccggtgatgctggcgggagtggtgtggtttatcgtcacctgtctggcaatattgctggcgcaaaacattgaacaattcaccctgttgcgcttcttgcagggcataagcctctgtttcattggcgctgtgggatacgccgcaattcaggaatccttcgaagaggcggtttgtatcaagatcaccgcgctgatggcgaacgtggcgctgattgctccgctacttggtccgctggtgggcgcggcgtggatccatgtgctgccctgggaggggatgtttgttttgtttgccgcattggcagcgatctcctttttcggtctgcaacgagccatgcctgaaaccgccacgcgtataggcgagaaactgtcactgaaagaactcggtcgtgactataagctggtgctgaagaacggccgctttgtggcgggggcgctggcgctgggattcgttagtctgccgttgctggcgtggatcgcccagtcgccgattatcatcattaccggcgagcagttgagcagctatgaatatggcttgctgcaagtgcctattttcggggcgttaattgcgggtaacttgctgttagcgcgtctgacctcgcgccgcaccgtacgttcgctgattattatgggcggctggccgattatgattggtctattggtcgctgctgcggcaacggttatctcatcgcacgcgtatttatggatgactgccgggttaagtatttatgctttcggtattggtctggcgaatgcgggactggtgcgattaaccctgtttgccagcgatatgagtaaaggtacggtttctgccgcgatgggaatgctgcaaatgctgatctttaccgttggtattgaaatcagcaaacatgcctggctgaacgggggcaacggactgtttaatctcttcaaccttgtcaacggaattttgtggctgtcgctgatggttatctttttaaaagataaacagatgggaaattctcacgaagggtaaaaaaatgcctgactgctttgtgcgatcaggcattctcgaattaatggtgatggtcgtcaatctggtgttcgataaccatcccttcacctacgctggcaagatggcgaacataaggatgcgggcggtaagccggagctggcgcaggagccacatagacggtttgcggcacagtcgcgacgctgaccgcttgtggaacgctgactgaatcaggaaccacaaccactttgtatccactcggcacatcgacggtgacactttgcgccatcgccacaccagtaaagcccattaaaagcgcgcccaacagtagacaatttttcataatcatttcgcctgaaataatgcagcgggttaatttccgcgaattatgcagccttcattcaggcattgtgttgccgggcgtgctgccggttttattggtcaaatggcgcttcgtgtttaagaactttatcgatcacatccagtacgccttcacggttattggagcctgcgcggtattttgccgctgcgacgaccgcgctaccggcattttccattgcaaaactaaagcctgcctgacgcagcatctcaatatcgttaccgccatcgccaaagaccaccacttcgctgtcgtctattccccataatttctgcagttggcgaaggccattggctttatgtacgccggggataatcagatcgatgctgccgttgccggtgtggaccgacaccataatatcgccgatggcctcatgtaatgctttttgtacttgtggaatcagttcatcggaaagattcaggccaaacttaaagaagatatcctctaagttgtcaaagttatcgacgtattccagacggtgataatacatttccgccaccgttttcatggcatcgtcatattttttgagtgtataggcactattttttccgcaggcaataatttccacttccgggcgcgtcagcaaatgttccacgacagtagcaaacgcatccttcgatagctcgccattaaaaacatctttgccttcgctcactacccagccgccgttttcagccacaaaggcaatttcattagcaatttcagggaagaaagagatcaactgataatattgattcccgctggcgactacaaagcgaattccttgtgctttcatttgctgatactgagccataaaccgctcacggttataggttttttgatcgcttaagaaagtaccatccatgtctaccgcaattaatttaatgctcatcaactattctccatcgccgtctgcgttttggtatcgggtttggcgacggctttcgcgacaatagccgcgagaataaccagcgccagtacaaccagcattgcactacgtaatccataatgttcgccgagatagcccagcagcggcggcccgacgaggaaagccagataaccggtcgttgctaccacactgacgcgggttggtgcatcggggccggtatcgctggcggcagaaatggtcagcgggaagcccagcgaggcacccagtccccagagtacaacagacaccccagcgacccaggcgctatcgacaaaaataatcagcccaatacccaacgcccccattagtgcactggcccgaaccacggcaacgcgactgtaacggtcgatgaaccaaccgccggtgaagcgtccaacggtcatccccagggtaaaaccggcataaatcagcgagccggaagtagggctaaaaccgtgaccgtcaaccattaataagggtaaccagtcgttggcagaaccttcggcaaaggccatcgccagcaccacaacacctatcagcagcaactggatatcgcgataaaaaggtacgcctttttcgccatgctgggtgccatcggcagcatttttgcccgtaccgtcagggattgcctgaatggcgatataaataggtgcgatacctaccagcgccgccaataaaatgtgcaccgttgccggaacgccaaaggccgtcagtgccatcccgacacctgcgcctgccagcgtgcccaggctataaaaaccgtgcatcatcggcaaaaccgtcttattcatttctcgctcaacggcagcaccttcaacgtttatcgccacttccgcagaaccaaaacttgccccaaagacgccgagaccaacggcaaagagcaggggcgatgtcagccagagtgccagacttaatatcatcatcccgatcaatgcgcaggacatcgtgaccaggatgacattacgtgtcccaaagcgtttcactaaccacgccgagcagagaataccgctcatcgaaccgatcgacagaccaaagagaacaccgcccatttcagcgatcgagacagagagaatatcgcggatagcaggcgtacgggttgcccaggacgccattaacaggcctggcaaaaagaagaacataaacagcgcccaggttcggcgtttcaatgcattacgtgaagaatttacggtcatagatcacgtcaaaataagaagagggaagacaacattagcaaggttgtgtacatttgtacacaattgcagagagaggaaatgacatgcgtcgcgctaacgatccgcaacggcgagaaaaaattatccaggccacgctggaggcggtgaaactttacggaatacatgctgttacgcaccgcaaaattgctacccttgccggggtaccgttgggatcgatgacctactatttttcaggaattgatgagttgttactggaggcgttcagcagttttactgagatcatgtcccggcaatatcaggcattttttagcgatgttagtgatgctccgggcgcatgccaggctatcaccgatatgatctacagctcacaggttgcaacgccggataacatggagctgatgtaccagctctacgcgctggctagccgaaaaccgctattaaaaacggtaatgcaaaactggatgcagcgcagtcagcaaacgctcgaacaatggtttgaacccggaaccgcccgcgcgcttgatgcgtttattgaggggatgacgctgcattttgtcaccgaccgtaagccgctatcgcgcgaggagattttgaggatggttgagagggttgcagggtagtagataagttttagataacaaaaaacccatcaaccttgaaccgaaatggcggggttgatgggctccacaaaatggggacatcaaagaaaagcagtggcactaattaagactgatgccctgcggaaaagttctgcggttgtgcaaaaaaatttcattttcagggcaacttcagttttatcctaatcctggccataccatgacgatgattgtccctgccagcgtcagcaggacgttggcgattgcataggtgcccgcatagcccagcgccgggatgttactgcgagctgtatcactgatgatctccattgccggcgcgcaggtacgtgcgcccatcattgcgccgaacaacagcgcgcggttcattcgcaatacataagcaccgaacaagaaacagataaccacgggcaccagactgacaatcaatccggcaatcaacatctgaccgccaatcgcgcccaggccgttattaataccgctaccggcgctcagaccaacgcctgccataaacaccatcaagccgaactctttcaccatgcttaatgcaccctgcggaatgtaaccgaaggtcgggtggttagcacgcataaagcccagcataattccggcgaataacaacccggcagcgttccccatgccgaaactgaatgtgctgaactggaaggtgatcatcccgatcatcagcccaataacaaagaaggcgcagaatgccagcaggtcagtgacctggctgtgaatcgagataaagccgatgcgatcggcgatggtttttacgcggcgggcatcgccgctgacttgtaaaacgtcacctttgttaagcacgacgttgtcatctatcggcatctcaatctggctacgaatgacgcggttaaggaagcaaccgtgatcggtcaacttcagttgtgcgagacgtttacctacagcgttatggtttttaacgaccacttcttcagtgacgatacgcatgtcgagaaggtcacgatcgaaaacttctttaccgttacggaagctgggatcgagtcgggcatgggcgtcgggatagcctaccaacgctatttcatcgcccatttgtagcacggcatcaccgtctggatttgccagaatcccgttacgtcgaatacgttcaatgtagcagccggtttgtcgataaatacccagttcacgcagatttttgccgtcggtccaggccaccagttccgggccgacgcgataggcgcggatcaccggtaaataaaccttacggttggcatcagtgtccaggccacgttcgcgggcgatttgctgggcgctggtctgtaagtcctgatgctgcaatttcggcaagtaacgcgcaccaacaatcaaactcaccagaccgattaaataggttaaggcatacccgaggctcagattatccagtgccagtgagagctgcctgctttccatgccggaatgacgcagtgtatcgccagcaccgaccagaaccggtgtcgacgtcatagagcctgctaacataccggccgtcaggccaatatcccagccaaacagcttacctaaccctaaggcgatcaccagcgcactgccaaccatcaccagtgctaacattaggtaatttttcccatcgcgaaaaaaaatggaaaaaaagttcggtccggcttcgaccccgacgcagaaaataaacagcataaagccaagattaagcgcatcggtgttaatgctgaaatgttgttggcctaataacagcgatacgactaaaacgccaatggaattacccagttggatcgaaccaagtcgtaactttccgagacatagcccaagcgcgaggaccacaaataataacagaatgtaattcccatttaacaattcggcgacgtttatattcacggaggctaacttcttgtttactagtaagctgttgaaagaaatggtaatttacgataatgttttttaccagaattcagggcgcagattcattcagcgcacctaaacgatagtaaagtaacaatatattttactagtgtaatcacattaggtatcaacggctatatgaattgcgttggcctatattagcatggaatgcgaagcggctttatcttactgaacgccacactggcgaaaaatgtgttcgatagacgcagtgtcaggaggaacgagtgaaacataaacaacgttgggcgggggcaatctgctgttttgtcctcttcattgtggtgtgcctttttctggcgacgcacatgaaaggcgcttttcgggctgccgggcatcctgaaatcggcttgctatttttcattcttcctggagcagtcgccagcttcttttcacagcgtagagaagtcctgaaacctctgtttggcgcaatgctggcggcaccctgttcgatgctcattatgcggctgtttttttcaccgacgcgctcattctggcaagagctggcatggttactaagcgcggtgttctggtgtgcgctgggggcactgtgtttcttatttatcagtagtttgtttaaaccacagcacagaaaaaatcagtaaagccctcaacgcgagggcttgtcagacgatcaggcgtccagattttctttcacccatgcagcaaaatcggtatagccgccgatatgttgctgatcgacaaaaatctgcggcacggtttctacgggtttacctgccttttgttgtagatcttctttagtgatcccttccgcacgaatatctacatactgatactgaaaatcatcgcgttcattgctcaatttctcagccagatcttttgcacgcacacagtaagggcaacccgaacgaccaaaaataacggtttgcattatttctctcctcatagatttatgcctgtaatgatcacgctaaaatgtattcgctgaaagtaggtttaacctgttgcattaattgctaaaagctataactgttaaacacaatacagtgaaaagttttagactgaaggctcactttgcagagggaagcgtatgcgcgcgatcggtaaattgcctaaaggcgtgttgatactggaatttatcggaatgatgctactggcggtggcgctgctgtcggtaagcgactccctgtcgctgcctgagccattttctcggccagaagtgcagattctgatgatttttctcggtgttttgctcatgcttcccgctgcggtggtggttattcttcaggtggcaaaacgtcttgccccacagctgatgaaccgtccaccgcaatattcacgttcagaaagagaaaaagataatgacgccaaccattgaacttatttgtggccatcgctccattcgccatttcactgatgaacccatttccgaagcgcagcgtgaggcgattattaacagcgcccgtgcgacgtccagttccagttttttgcagtgcagtagcattattcgcattaccgacaaagcgttacgtgaagaactggtgacgctgaccggcgggcaaaaacacgtagcgcaagcggcggagttctgggtgttctgtgccgactttaaccgccatttacagatctgtccggatgctcagctcggcctggcggaacaactgttgctcggtgtcgttgatacggcaatgatggcgcagaatgcattaatcgcagcggaatcgctgggattgggcggggtatatatcggcggcctgcgcaataatattgaagcggtgacgaaactgcttaaattaccgcagcatgttctgccgctgtttgggctgtgccttggctggcctgcggataatccggatcttaagccgcgtttaccggcctccattttggtgcatgaaaacagctatcaaccgctggataaaggcgcactggcgcagtatgacgagcaactggcggaatattacctcacccgtggcagcaataatcgccgggatacctggagcgatcatatccgccgaacaatcattaaagaaagccgcccatttattctggattatttgcacaaacagggttgggcgacgcgctaaaaccgccacgtcgatgtatgatacgcgggcttttgaccaggtctgacagagaggtgcagggtgaaaattgccatattgtcccgggatggaacgctctattcgtgtaagcggctgcgtgaagccgctatacagcgcggtcacctggttgaaattcttgatccgctttcttgctacatgaacataaatcctgcggcgtcttctattcactacaaaggccgcaagttaccccattttgacgcagtgatcccgcgtattggcaccgccattaccttttatgggacggcggcactgcgccagttcgagatgctggggagctatccgctcaatgagtcggtcgccattgcccgggcgcgtgacaaattgcgttccatgcaactgctggcgcgtcagggcatcgacctgcctgtcacgggcattgcgcattcgccggatgataccagcgatttaatcgacatggtcggtggtgcgccgctggtggtcaagttggttgaaggcacgcagggaattggcgtcgtgctggcggagacgcgtcaggcggcggaaagcgtgattgacgctttccgcggtctgaacgcgcatattctggtgcaggaatatatcaaagaggcgcaagggtgcgatatccgctgtctggttgttggcgatgaagtggtcgctgcgattgaacggcgggcgaaagagggcgattttcgttccaatttgcatcgtggcggcgcggcaagcgtcgccagtatcacaccacaggagcgtgaaatcgcgataaaagccgcgcgaacgatggcgctggacgttgctggtgtggatattctgcgtgctaatcgcgggccgttggtgatggaggtgaatgcgtcgccggggctggaaggaatagaaaaaaccaccggtatcgacatcgcgggtaaaatgatccgctggatcgaacgccacgctacgacagaatattgcctgaaaacgggtggttagtcgcaatcacattactgatcatggttttgcctgcgctttttgcgtaagctgtgccggtctttttatcgaaagaggttgtacaaaattatgacatcgctggtcgttcctggtctggatacgctgcgtcaatggctcgatgacctggggatgagtttttttgaatgtgataactgtcaggctctgcatctgccccatatgcagaatttcgacggtgtctttgatgccaaaatcgatctgatcgataacacgatcctgttttctgccatggcggaagtccgaccttcagccgtattgccgctggcggcggatttatctgccatcaatgccagttcgctgaccgtgaaagcatttcttgatatgcaggatgataatctgccaaagctggtggtttgccagtctttatccgttatgcagggcgtaacctatgagcagtttgcatggttcgtgcgtcagagcgaagagcagatttcgatggtcattcttgaagctaatgcccatcaactgctgttaccgactgatgatgaagggcaaaacaacgttaccgaaaactatttcctccactgataactcctttcgagcacgcagtcgctggtgcagtggctgcgcgctgcaaaattatctgctgtttttaaccttttcttaaagattatttcacttctcttgtgtcgatttggctttatcacatagagcaaatatgcataaaaatttgttaaataccgttttttaatccgagctatagtctcaaaccctggctaaagttattcttgcgatgcttttatatagcgagcagtgctggccgggagaaagttctcttttcttacaccgcgccgataaaaaatatgcacgtttattgcatatctttcagtgtgacaacttttgttcgtttgttaacgaactttcagaaggaaagagatatgaccgccttaaataaaaaatggctatcgggtctggttgcgggtgctctgatggccgtctctgtcggcacgctcgcggctgaacaaaaaacactccacatttataactggtctgattatatcgccccggacacggtggccaattttgaaaaagaaaccggtattaaagtcgtctacgatgttttcgactctaacgaagtactggaaggcaaattaatggccgggagtaccggctttgatctggtggttccatctgccagctttctggagcgccagttgactgcgggagttttccagccgctggacaaaagcaaattgccggagtggaagaatctcgacccggaactgctgaagctggtcgccaaacacgatcccgacaataaatttgctatgccctatatgtgggcgacgaccgggattggctataacgttgataaagttaaagcggtgctgggcgaaaacgcgcccgtcgatagctgggacttgatcctcaaacctgaaaatctggaaaaactgaaaagctgcggtgtctctttcctggatgcgccagaagaagtttttgctaccgtgttgaattatctcggcaaagatcccaacagcactaaagcggatgattacaccggaccggcaacagatctgctgttaaagctgcgcccgaacattcgttatttccattcatctcaatacattaacgacctggcaaacggcgatatttgcgtcgctatcggctgggcaggtgatgtctggcaggcgtcaaaccgcgcgaaggaagcgaagaatggcgtgaatgtctcgttctcgattccaaaagaaggggcgatggcgttctttgatgtattcgccatgcctgcggatgccaaaaacaaagacgaagcctatcagttcctgaattacctgctgcgcccggatgtagtagcgcatatttccgaccatgtgttctatgccaacgccaataaagcagccacgccgctggtgagtgcggaagtccgtgagaacccaggtatttatccgcctgcggatgttcgtgcgaagctgttcactctgaaagtgcaggatccgaaaatcgaccgtgtgcgcacccgcgcgtggaccaaagtgaagagcggaaaataatccgcagtcgtagatgccggaggggcgcaccacacccgccggcaattcgcaccattatggtgcgcttgcacacattcaatgccggagagcagccgtgaatgacgctatccctcgcccgcaggcgaaaacccgtaaggcgctgacgccgctattagaaatccgcaacctgaccaaatcctacgatggtcaacatgcggtggatgatgtcagcctgaccatctacaaaggtgaaatcttcgcgctgctgggcgcatccggctgtggcaagtccacgctgctgcgtatgctggcaggtttcgaacaaccttctgccggacagataatgcttgatggcgtcgatttgtcacaggttccgccttacctgcgccccatcaatatgatgtttcagtcttacgcgctgtttccgcatatgaccgtggaacagaacatcgcttttggcctgaaacaggacaaactaccgaaagcggaaattgccagccgggtcaatgagatgctcggcctggtgcatatgcaggagttcgccaaacgcaaaccgcatcagctttccggtggtcagcgacaacgtgtggccctggcccgaagccttgcgaagcgcccgaaactattactgctcgatgagccgatgggcgcgctggataaaaagctgcgtgacaggatgcagcttgaagtggtggatattctggagcgcgtcggtgtgacttgtgtgatggtcacccacgatcaggaagaggcgatgaccatggcggggcgcatcgccattatgaatcgtgggaaatttgtccagattggcgaaccggaagagatctacgagcatccgactacccgctatagcgccgaatttattggctcggtaaacgtctttgaaggcgtactcaaagagcgtcaggaagatggcctggtgcttgattcgccggggctggtgcatccactgaaagtcgacgcggatgcctcggtggtcgataacgtgccggtacatgtggcgctgcgcccggaaaaaatcatgctttgcgaagagccgcccgccaatggttgtaacttcgcggtgggggaggtgatacacattgcctatctcggcgatctttcggtgtatcacgttcgtctgaaaagtgggcagatgattagcgcccagctacaaaacgcccatcgtcatcgtaaagggttaccgacctggggcgacgaagtgcgtttgtgctgggaagtggacagctgtgtggtgctgacggtttaaggagcaaagatgagtacacttgaacctgctgcccagtcgaaaccgccgggcggatttaagctgtggttgtcgcagctgcaaatgaagcatgggcgcaaactggtcattgcgttgccatatatctggttgatcttgctgtttctgctgccatttctgattgtctttaaaataagcctggcggagatggcgcgcgctattccaccttataccgaactgatggagtgggctgacgggcaactgtccatcactcttaatctcggtaattttctgcaactgaccgacgatccgctctatttcgatgcttatctccagtcgctacaggtggctgcgatttcgacattttgctgtttactgatcggctatccgctggcgtgggcggtggcgcacagtaagccttcgacccgtaatattttattactactggtgatcctgccgtcgtggacctcgtttctgatccgcgtttatgcctggatgggaatattaaaaaacaacggtgtgctgaataattttctgctgtggctgggggttatcgatcaaccgctgaccattctgcataccaatctggccgtttatatcggcattgtttacgcttacgtgccgtttatggtactgccgatttataccgcgttgattcgtattgattattcgctggtggaagcagcgctggatctcggtgcacgaccgctgaaaacgttctttactgtgatcgtgccgctgactaaaggtgggattattgccggatcgatgctggtgtttatcccggctgtgggcgagtttgtgatcccggaactgctcggtggcccggacagcatcatgatcgggcgcgtgctatggcaagagtttttcaataaccgcgactggccggtggcctcggcggtagcgatcatcatgttgctgctgctaattgtgccgataatgtggttccacaaacaccagcaaaaaagcgtgggagaacacggatgaataatttaccggtagttcgttcgccctggcggattgtgattttgctgctgggctttacctttctctacgcgccaatgctgatgctggttatctattcgtttaacagctcgaagctggtgacggtgtgggccggctggtcaacgcgctggtatggtgagttattgcgcgatgacgcgatgatgagtgcggttggtttaagtctgacaattgcggcctgtgcggcgacggcggcggcgatcctcggaactattgcggcggtggtgctggtgcgctttggcaggtttcgcggatcaaatggctttgcctttatgatcaccgcgccgctggtaatgccagatgtcatcacgggcttgtcgctgttgttattattcgtcgcgcttgctcatgccattggctggcctgcggaccgcggtatgctcaccatctggctggcgcatgtcactttttgtacggcttatgtggcggtcgttatttcttcaagattgcgggaactggatcgctcgatagaagaagcagcgatggatctcggtgcgacgccgctgaaagtgtttttcgtcattacgctaccgatgatcatgcccgcgatcatttctggctggttactggcttttactttgtcgcttgatgatctggtgatcgccagctttgtttccgggccgggagccaccacgttaccgatgctggtcttttccagcgtgcggatgggggtgaatccggaaatcaacgccctggcaacattgatcctcggcgcggtcggaattgtcggatttatcgcctggtatctgatggctcgcgcagaaaaacagcggatacgcgacatccagcgtgcaagacgtggctgaagacactaaaatttgccaacctggctacataatgccgcgcatgtcgcggcattgttttcatggaagacgaaacgttgggattttttaagaaaacatcttcatctcatgctcgcctgaatgtgcctgcgctggtgcaggtggcggcgctcgccattattatgatccgtggcctcgacgtgctgatgattttcaatacgctgggcgtgcgcggtattggcgagttcattcatcgcagcgtacaaacctggagtttaacgctggtctttttaagcagtctggtgctggttttcattgagatctggtgtgcgttttcactggtgaaagggcgtcgctgggcgcgctggctatatctgctgacacaaatcaccgccgcaagttacttgtgggcggcttcgctggggtacggttatccggagctgttcagcattcccggtgaatcaaaacgtgaaatcttccatagcctgatgctgcagaagctgccggatatgctcatcctgatgctgctgttcgttccctcgaccagtcggcggttcttccagttgcaataatgtgtataatcgtcgcccctgatgatgtgaaggtcaatgtatgcagtgcgcactttacgacgcgggtcgctgtcgttcctgtcagtggataatgcagccgattccagagcaactctccgctaaaaccgccgatcttaaaaatctgctcgccgactttccggttgaggaatggtgcgcgccggtgtcaggcccggaacaagggtttcgtaataaagccaaaatggtggtgagtggtagcgttgaaaaaccactgctcggtatgctgcatcgcgatggcacaccagaagacctttgtgactgcccgctttatcctgcctcatttgcgcccgtttttgcggcgctaaaaccgtttatcgcccgagcggggttaacgccctacaacgtggcgcgtaagcgtggcgaactgaaatacattctgctgactgaaagccagagtgatggaggcatgatgctgcgctttgtactgcgttctgataccaagctggcgcaactgcgtaaggcgctgccgtggttacacgaacaactaccgcagctgaaagttattaccgtcaatattcagccggtacatatggcgattatggaaggggagacggagatctacctgaccgaacaacaggcactggcggagcgttttaatgacgtaccgctgtggatccgtccgcaaagtttcttccagactaatccggcggtcgccagccagttgtacgccaccgcgcgcgactgggtacgacagctgccggttaaacatatgtgggatctgttctgcggtgtggggggctttggtttacactgcgcgacgcctgacatgcagttaaccgggatcgaaattgcatcagaggccattgcctgtgcaaagcagtcagccgctgaactgggcttaacgcgtttgcaatttcaggcgctggactccactcagtttgccaccgctcagggggatgtgccggagctggtgctggttaacccgccgcgccgcggcattggtaaaccgctgtgtgattatctctcaacgatggcaccgcgttttatcatctactccagctgtaacgcccaaactatggcgaaagatatccgcgaactgcctgggtttcgtattgaacgggtgcagcttttcgatatgttcccgcataccgcgcactatgaagtgctgacgctgctggtgaagcaataaaaaagccgcatgtgcggcttcagattgctgacaaagtgcgcgttgtttatgccggatgcggcgtaaacgccttatccggcctacaaaagcgtgcaaattcaatacattgcatgggccatgtaggcctgataagcgtagcgcatcaggcaattttacctttgtcatcagtctcaagccgcggttgcggctttctgaatcttactgtgggaaccactggtcactgattttttgataagtaccgtcagctttaattgctgccagcgcgttattcagtttttccagcagggctttgttatccggacgtacagcgatgcccaggccggtgccaaaatattgcggatcggtcactttctcagtagcaacaccaagttgtggattggttttcagccattcgtttaccaccgctgtgtcaccaaataccccatcaatacgaccatttttcagatcgataaaggcattctgataactgtcataagagacagttttcacttccgggtgctgatcctgaatatatttctggtgcgtagtaccgttttccatcccaatacgtttgcctttcagatcggcaaacgttttgtaggtatcttttttggcaatcacgacggctgagttttcatagtagggcgtggtaaacgatacctgtttgctacgctccggggtgatatccataccggagattacggcgtcatattttctgaatttcagggacgggatcaggctgtcgaacgcgtgattagtaaaagtacattctgcctgcatttgtttgcacaaggcttttgccagatcgatatcaaagccgacaatctcattattagcacctatagattcaaagggtggataggtggctgaaacgccaaaattgattttctctgcggcagaagcaccgaaagtaaaggaagcaagtaaagcggcaagaactaactttttcatgatggaactcccgtctgtcaatcttatgatttttggccgtgtctgcggcatgggataacaatgccatcaagtgaatttatatgcaataaacatgattaaataatttaaatgaaataaaaaagacggacaacttagtgggttgtccgtcttcattataagaatttatgcactatgtaggccggataaggcgtccccgccgcatccggcacaggcaccgtgctgatgtctgatgcgacgctggcgcgtcttatcagacctacaaaaccccccggcgaatgtacgcagccacattaatttcgccgttcgaatgccagcgctttgcgctcgatcagacgcatcatcagcgtcagcaggccgttaacgaccaggtaaataatccctgccgcaccgaacaccattacatcgtaggtgcgtccgtacaacaactggctgtatcccatcacttccatcagcgtaatggtgtatgccagagaggtacttttgaataccagcaccacttcgttggaataagaagagagcgagcgtttaaaggcatacggcagcaggatcgccagcgtatcttttttgctcattcccagggcgctacaggactgccactgaccttccgggatcgcacgaattgcaccgtaaaacagctgcgtggtatacgccgcactattcagcgacaacgcaatcagcgcacataaccacggttctgacaacaaatgccacagtgccggatactcctgcaaagtcggaaactggcccggcccgtaataaatcaggaagatctgcaccagcagcggcgtaccggtaaacagcgtgatataaccccgcaccagccacaccagcaccggcgttttcagcgtcaggatgatggtaaaaatcaatgccagaatcagtgccacaatcagcgaggcaacggttagcgtcaggctggtgtgtagccctttcatcagttcgggtaaatactcaaacattagctgggcctccgctcaaaacgtgtcgcgcgcaggtcaatgcgtttgagaatgtactgactgagcagggtgatcaccaggtaaatcgccgccgccacaatgtaccaggtaaatggttcctgggtacgagtagcgatgctttttgtttgcagcattaaatcattcacactaatcaaactgaccagcgcggtatctttcagcagcaccagccactggttaccgaggccaggcagcgcatgacgccacatctgcggcatcaccagacggaaaaagatagccgatttcgacagccccagcgcctgaccagactcccactgacccaccggcaccgctttcaacgcgccccgaagcgtttgcgaggcataggcggcatacagcagtgacagagcgatgacaccacaaaggaacgggctaacgtcgaagttctcaatgtccatctgcactgggatctgcacgaacccaagattgatagtgaagccatccgaaagcgtcagcagcagctgcgaggagccaaaatagataaacagcaccaccagaatttctggcaggccacgcagaatggttaccagcgctgaacctgcccacgcgacaggacgccattttgccgactcccataccgcaaagaacatcgccagcgccagcccgacaatcaatgcacaaacggcaaggccgacggtcatcccggcggcgcttgctaaaggaaaaaattcattcatcaggaattacttctggaaccatttgttgtagatggtttcgtaagtgccatctttcttcactttttccagcgcagtgttgagtttctgctgcagctcagtgttgccctgacgtaccgcgatgccgaggccagtgccgaagtaatctttatcggtcactttgtcgcccaccgccgccagtttcgggttatctttcagccactcagtgaccactgcggtgtcaccgaagacgccgtcgatacgcccgttttgcagatccagttttgcgttctggtagctgtcatacggaacggtagtgatttccgggtgcttatccataatgaatttctggtgtgtcgtcccgttctgtacgccgacttttttgcctttcagctgatcaacactggtgtatttgccttgctgacccacaaacagggcagagttgtcatagtacggggtggtaaacagcacctgcttttcacgctccggagtgatatccatgcccgccatcacggcttctacgcgacggaatttcaggcttgggatcaggctgtcaaacgcctggttagagaaagtgcaggttgcatcaatctctttacacagcgcttgtgccaggtcgacgtcaaaaccaacgatctggttgtttgcatcaatcgattcaaacggaggataggaggcttcggtagcaaaacgaatggtttcggcagctgtggcggaaagactaaaacctgcaattaacgcggcaatcagaacttttttcattgttgttatcccgaatcttagtgagagagatagtttttaaatgcttcggtttgcggctcggtaaagcagctcgcgtcgccttgttctacgatatgaccattttccatatacaccactcggctggcggttttacgcgccacttcaacttcgtgggtgacgatcacctgggtaatattcgtttctgccagctcacgaatgatgctgacgatttgtgccgtaatttccgggtccagtgcggcggtcggttcatcgaacagcagtacctgcggttccatcatcaacgcacgggcaatagcaacacgctgctgctgaccaccagaaagatgcagcgggtaacgatcgctataaggtttgagacgcagacgttccagcagtttttctgcacgggccagcgcctgatctttactcaaccccagtacacggcagggcgcttcaatcaggttttgctgcacggtcagatgcggccacaggttgtattgctgaaacaccatgccaacgttacgacgcaaatcgcgaatcgctttgtcagagggtgttttggtgaaatcgaaatggttgcctgcaatgttgagcgtaccggagcgcggcatctcaagcagattgagtacacgcagcagcgagcttttacccgcgccgctggggccaagtaacaccagcgtttcgccctgtgggcaatccagcgtgatatcgaacagcgcctgatgcgcgccgtagaagcaattaatgccgtttaattgaatactcattgacactcgtatactggcagtctgatagctattgaggtcgaagatagtacctttgacagaataattatgcaatatttctgctttaaaagttaaaagcaaagcgcattattcaataaacatagcacaaaataacgggggcggtggtcggcgagcataaatgtcggcattcctcacgaaatgccggacaatttacggggtttattggttgatcaaggcgttagcgattctcgatggactgacggagcgtacccgccgtggcatgaacgctaccgcctaagtaacgcacatcgtcgatgacccaacactggccttcctgaatcattaacacttcatcctgccaaccctggtcaccctgtttgagatccacgcgcaatggaatgttacgggcatcacgattagggatagtcgatgcactggcaacgtgggcgctatctggcaaggtggttcgactggagaatggatcgttggtcagtagttcccgatggttattatcccgggaggcatcgctaagcagtgtcgccagtttgtcgctcagataagggcgcaaggcggtgatgtcgttgctgcggtgcaaaatgcggtagtcataaaattgctgggccacgttatccgggcctccttcaacgcaaggaccactgcgtgtgccgttatctttataagctggagtgactgtggtgcaggcactgaggagcagtgcgcaggggataagcattgtcaatttgctgtagcgcataatgatttccttataagcgatcgctctgaaagcgttctacgataataatgatatcctttcaataatagcgtatcagtctgataatgcttttgagatcgaaggcttagcaaacaaggagatcgatcatgcaattttctacaaccccaactctggaaggccagaccatcgttgaatattgcggtgtggtgaccggcgaagcgattttaggtgccaatattttccgtgatttctttgccggtatccgcgatatcgttggcggacgttccggtgcgtatgaaaaagaactgcgtaaagcacgggagatcgcctttgaggaattaggctcccaggcgcgggcgctgggggccgatgccgtcgtcggtattgatatcgactacgaaacggtcgggcaaaacggcagtatgctgatggttagcgtcagcggtacggcggtgaaaacgcgtcgatgagaagattcttctggctggtcgctgccgctctgttattggcagggtgtgcaggcgaaaaaggcattgtcgagaaagagggatatcagcttgatacccgacgccaggcgcaggcggcgtatccgcgcattaaagtgctggtgatccactacaccgcagatgattttgatagctcgctggcgacactgaccgataagcaggtcagctcgcattatctggtccctgcggtaccaccgcgatacaacggtaaaccgcgcatctggcaactggtgccggaacaagaactggcctggcatgcggggattagcgcctggcgcggggcaacgcgccttaacgacacctctattggcattgagctggaaaaccgtggctggcaaaaatcggccggagtgaaatattttgccccgtttgaaccggcacagattcaggcgcttattccactggcgaaagatattattgcccgttatcacatcaagccggaaaacgtagtggcacatgcggatatcgcaccgcagcgcaaagacgatccggggccattatttccctggcagcaactggcgcagcaggggattggtgcctggccggatgcgcagcgggttaacttttaccttgccgggcgcgcgccgcacacaccggtagataccgcgtcattgctggagcttttggcgcgctacggttatgacgttaaacctgatatgacaccgcgcgagcagcggcgcgtgattatggcattccagatgcatttccgcccgacgttatataacggcgaagcggatgcagaaactcaggcgattgccgaagcattgctggagaaatacgggcaggattagcgcggcagttttccgtggtcgcgtagccaggcggcagttttctcgataccttcatccagggtgatgaccggctgataacctaactcttcctgcgcacgcgtaatatccagcgtaaagtcaaaattcaacttggagacgccgtagtgggtcagcggcggctcttttgctgacttgcggcctaaacgctccatgctgcgggcgatcatatccagcatcgggtaggggacggaacgaatacgacagtcaatattcaactcgtcgatcagcttctgcacgatgctgcgcagtgtgcgatgctcgccgttggtgatgttgtacacacgcccggaaggtagcttatcgcaggcttcctggcttgccagccacattgcgtgcacggcattttcatagtaggtcatatcgaccagcgcactgccgccatgcggtaacagaatactgccgtagtggtgcatcatatgcgccagacggggaataaagactttatcgtgcggtccgaacagactttgtgggcgcagaatagtaaagcgcgtttgtggattcgcctgcgaaagcatattgatcacttcttcgctggctgctttgctgcgggcaaactcgttggcgaagcggtgagggcgaaaatcttctttaatatcgcgatggtggtgataatcgaagtacagggagggggaagagatatgaataaagttacgcacaccccaggcgacagcccattcacccaggcggcgagtggcgcgaacgttagccagatcgaaagcctgttgtgtcccccagggtgaggtaaagctggagcagtgccacagcgtatcaatgcccgcgagcatcactttagcttgtgatgaaaccagctcggtcagatccgccggaacaaactctgcgcccattttttccagcaatttgcccattgcctcgttgcgaccggtcgctcgcacgctgatgcctttctggcataaaaactctaccgcgtttcgacctaagccgctggtggcgccggtaaccagtaccttcatatcaatccactgttgttgagaaaataacgtgcgcattcttccgtgatttcccccatgatgcaatgggaaacatgaaagaataacgcaggttttgtcgattaatctgtgctttgttctgccagtctggcgatttgttttgccattccgcgaaaaataaacagatgcgcggggatcatcaataaccagtaaaacagccccggcataccgtgcggatgccagaaagcgcggacatcgatagtacgatagtcgcctttatcttccaggctaaaacacagtcgtcccagccccggcgctttcatgccaaataacaacgtaagttgtttttccggttcaacgacaatcactttccagctatccaccgcatcgccagtctgtaaatattcgcgctccgggcggcctttcgccagcttatgaccgatcgcgcggtccatcaacgcccgtgtctgccacaaaatattgccaaagaaataacgctctttaccgccgatttggttcactacctgccataaagcagcaaggctggcggacgttttaacggtaaaccccgcctgtttggcaaaataaccgtactccggtcgccagcgggcaaaggcctgagcgtcgtagccccagtcgctggagttgaccagtttttcctcctctttcaacgtgctacgtaccgcgtcatcgaaagcgatcagccgttgtgggatgagtgcacgtagcgcggtatcatccgccagcagatcgtgtttcagcccctgaatcaacgccctggcggtggtgggcggtacggaagtaatcacattgagaaaccacaccgaaatccagcgggtggggagggggatggggatcaaccagcggcgcttaccgctcaccgccataaaatgttcaaactgttgctgataactgagcacctctggtccggcggcttcgaagatgcggtgttcgctggccggatgatctaacaacgcaaccagatagtgcagcaagttttccagcgcaatgggcgtggtgcgtgaacgaacccagcgcggaggcgttaagactggcaggttgtagaccatatcgcgcatgacttcgaacgccgcggaacctgcgccaacgataattccggcccgcagttcggtcacgggtacattcgcttcacgcagaatgtccgccgtagcctgacgagcacgcagatgatccgactgctcatgtggcggggcctgcaacgaactaagaaagattaattgcttaactggtacttcacgtagcgcatcgcggacgttgagagccacctggcgctcctgagcgataaaatcgccgccttcgcccatgctgtgcaccagaaaatagaccgtatcgatatcctgcaacagggccggtaggttatccggccagctgagatcgactttatggcaactgacgtttgccagttgcagctttgcaagcctgtcgacatgacgtgccgccgccaggatctgatgcccttgctggctgagtgtgcgcaccagatgctgaccaatgtagccactggcaccgagaactaaaatgcgttgcggcacgtctctctccttaacgcgccaggaatgcacgccagtgggcggcgacttccgccagttgttcgcgcgagacgtcaagatgcgtcaccaggcggacaatcggcgaggcgttaatcagcacgtttctcgctttcatgtattcgcctaacgcggcagcattttcttccccgacgcgaacaaacagcatattggtgtcctgacgcatcacatccgcgcctgcttcacgcagctgctccgccatccaggcagcgttgtcgtggtcttcctgcaagcgcgcaacgttatttttcagggcatatatcccggcggcagccagaatgccggactggcgcatcccgccacctgtcattttccgccagcgaatggcacgtttaatgtaatcacgattaccgacgagtaatgaaccgactggcgtcccaagacctttcgacaggcaaatggtgaacgaatcacaatattgcgtgatctctttcagttcgcagccgtaagccaccacggcattaaagatgcgcgcaccgtcaacatgcagcgccagattgcgctcgcgggtaaattcccatgcttctttcaggtattcccgcggcaacactttgccgttgtgggtgttttccagactgagtaatttggtgcgggcgaaatggatatcgtcgggtttgattttcatcgccactttatccagcggtagcgtgccgtcggcagccgcgtctatgggttgcggttgaatactgcccagcaccgccgcgccaccggcttcaaacagatagttatgcgcggcctgaccgacaatatactcttcgccgcgttcgcagtgactgagcagagcgaccaggttggcctgagtgccggtaggcagaaaaatggcggcttctttaccggaaagctctgctgcgtagtcctgcagagcattaacggtagggtcgtctccgtaaacgtcgtccccaaccggggcggccatcatcgcttcgagcatggcgcggcttggtcgggtaacggtatcactgcgtaaatcaatcatggcatgtccttattatgacgggaaatgccaccctttttaccttagccagtttgttttcgccagttcgatcacttcatcaccgcgtccgctgatgattgcgcgcagcatatacaggctgaaacctttggcctgttcgagtttgatctgcggtggaatggctaactcttctttggcgaccaccacatccaccaacaccggaccgtcgatggagaaggcgcgttgcagggcttcatcaacttcagacgctttttctacacggatacccgtaatgccgcacgcttcggcaatgcgggcaaagtttgtgtcgtgtagttcggtgccgtcagtcaaatagccaccagctttcatctccatcgccacaaagcccagcacgctgttgttaaagacgacaattttcactggcagtttcatctgcactactgagaggaaatcgcccatcaacatgctaaaaccgccatcgccgcacatggcgaccacctgacgttctggctctgtcgcctgcgcacccagcgcctgcggcatggcgttagccatcgaaccgtggttaaacgaacctaacaggcgacgcttgccgttcatttttagataacgtgccgcccacaccgttggcgtaccaacgtcacaggtgaaaatagcgtcatcggcggcaaaatgactaatttgctgcgccagatattgcgggtgaatggctttctcgctcggtttagctaaatcgtccagccctttgcgggcgtcgcggtaatcttccagcgctttatccagaaacttgcgatcggctttttcttccaccaatggaagcaatgcacgcagagtcgacttgatatcgccgaccagtgccatatccaccttgctgtgagcgccgatgctggctgggttgatatcaatctgaatgattttggcatcggtcgggtagaaggcgcggtagggaaattgcgtgccgagtagcactaacgtgtcggcgttcatcatggtatggaaacctgacgagaagccgattaacccggtcattccaacatcatacggattatcgtattcgacatgttctttaccgcgcagggcatgaacaataggcgctttaattttcccggcaaactcaactaactctttatgcgcccccgcgcagccgctgccacacatcagggcgatattgctggaataacgcagcagttgcgccagtttgcgtaactcttcttcttccggcgtcacgactggttgtggcgcatgataccagtgcatggttgccccttctggcgcaggttttaacgccacgtcgcctggtaacacgacaaccgaaacgccacggttaagcaccgctttgcgcatggcaatcgccagtacttgtgggatctgctccgggctggaaaccagctcgcaatagtgactacattcgcggaatagctcttgtgggtgggtttcctggaaatagccgctgccaatttcgctggagggaatatgagcggcaatcgccagtaccggaacgtgattgcggtggcaatcgaacaggccgttgattaagtgcaggttgccggggccgcacgatccggcgcagaccgccagttctccgctaagttgtgcttcagcgccagcggcaaaggccgccacttcttcgtggcgggtggacatccactcgatggtgcccatgcgattaagactgtcactaagaccgttcagagagtcgcctgtgactccccagatgcgtttcacccctgccgattcgagtgttttggcgatataagctgcaaccgtttgtttcatggttctccatctcctgaatgtgataacggtaacaagtttagttcatctgacggagggggaagggatgggagagaaaggaggcactaacggttaaatagcccgatgaaaggaatatcatcgggcataaggcgattatgcgagaaccaaatccccctgcggatggcaggagcaggccagtacgtaaccttcagcgatttcggcgtcggtcagcgtcattgtgctgctcaccgtatattcaccggaaaccacttttgtcttacagcagccgcaaacacccgcacggcaggcagcgacaaccggaacgttattgctttccagcgcctccagtagcgtggtgccaaccggggcgtaaaattctcgtgccggttgcagtttggtgaatttcagaccgctggtcgccgcttctgctactggggtgaagaatttctctttaaagaaacgcgtcacgccgagcgctttcacttcctgctctacccaatccatatacggagccgggccgcaggtcatcacggtacgtgaagctaagtcaggtacacctgccagcagttcgcgagtgagacgaccagcgataaagccttcggtaacgttattttctgccaccagcgttaccggatagttacgccactcatcggcgaaaataacatcctgcggcgtacgcacgttgtagatcacccgcacatcggcctgtggacggttcttcgcaagccagcgacgcatcgacataatcggcgtgacgccgcagcctgccgccagcaacaggaatttatcttctgctttatcgtcgcaggtaaattcccccatcgcgtccgaaagccagagataatcaccgcgttttacatcgcgcgtcagccactgggagccgacaccgtcatcaatccgccgcacggtcagggtgatatattcactcacgcctggcgtggaggaaatggtgtaagcacgcagcgtttccgctgagtttcgcacgctgaccagtgcatattgcccggcgcgatatgggtagtaatcgtggcaaatcagggaaatcgtccacacatccggcgtttcttgcgtaatgtgatgaacctgcatccgccacgggcattgattcgttggcatcgtcatcgacaaactccttacgcgctcaacagttgcttcatgtcttcttcaacagtggtgatagaacgcaggccgaatttctcgttcagcaccgccagcaggtctggtgtcaggaaaccaggtgcagtcgggccggtgacgatatttttcacgcccagagaaagcagcgtcagcagaatgacgatcgctttctgttcaaaccaggagagcaccagcgacagcggcagatcgttgacaccgcagcccagtttctctgccagagtgacagccagaataatcgctgagtaagcatcgttacattgacctgcatctaccagacgcggcagaccttcgatatcgccaaactcaagtttgttaaagcgatatttaccacaggcgagggtcaggatcaggcagtcatccggcacgctggtggcgaaatcggtgaagtagtggcgctcgccgcgtgcgccgtcacagccaccaagcaggaagatatgacgcagtttttcacggctcaccagatcaatcagcgtatcagcagcgccaagcagcgtctggcgaccaaaacccacggtgataaggtgcggaatttcgctgtacgggaagcctgccatctgttgcgcctgggtgataaccgcagagaaatcatcaccgtccagatgacgcacgccaggccagccaacaatgctgcgggtccagatacgatcgtcataagcgcctacggttgggtcgatgatgcagttcgaggtcatcacgatggggccagggaaacgagcgaactccacttgctgattctgccagccgctgccgtagttaccgaccagatgcttgaatttacgcagctccgggtagccatgcgcaggcagcatttcgccgtgggtgtagacattaacgcccgtgccttcggtctgttccagcaggttgtagagatctttgagatcgtgaccggaaatcagaatgcatttacccgccgtcgctttgacgttgacctgggttggcgtcgggtgaccgtatttaccggtttcgcctgcatccagaatgctcatcactttgaagttcatctggccgatttccattgaacactcaagaagcgcgttcatatcggcaggccaggtccccagccacgccatgattttatggtactgggcataaatatcgttgtcgtattgaccgagaacatgcgcgtgttccatataggccgccgcacctttcaggccatacaggcacagcagacgcaggccgagaatgttttcgccaatcgccgctttatctttgttaggggtaaattctgctgcctgacgttgcagctcgccgagatcgtcgctcaccagttgcaggtcagccatcgggttatcgacgcgcgcgttggcatctacagccaggcattgcgctttcagcgcctcgcgcagggcaatcgcttcacgagcgtagccgacaatacgcggagaatcgaagttaacgttggtcagggttgagaaaaaggcacgtggcgcgaagctgtcaacatcgtggttgatgatgccgtattcacgcgcttttaccgcccaggcagaaagcccttgcagcgccgcgatgagtaaatcctgaaggtcagaagtttccgccgttttaccacacatcccctgcgcgtatgagcagccgtttcctgccggagtacggatagtttgttcacattgcacacaaaacatgatcacaccttttaaagttatatttaatatacatgtttaaggttaagacgcttaacgcggggataaaagggatttttcatgcaactttaagggagattgatttagcgcaattttggcggcagggatctaccgccagagaggtattacgcagagaaaaaggcgatgaggatcggcactaacaggctaagaataaaaccgtgaacaattgccgccgggaccatatccagcccgccagtacgttgaagaacgggcagggtgaaatccattgatgtggcaccgcataagcccagtgcagtagagcggctgcggcgaatcagcccagggatcaacataatagcaatcagttcacgggccagatcattaaaaaacgccgcgctcccgattaccggaccaaaagattcggtcaataaaataccggaaagagaataccagccgaaaccggaggccattgccagcgcggtattgatggggagatcaagaataaaggcgttaattaaaccaccaattaatgaactgacaaccaccaccacggcgacaatcattccccggcgattaaggacaatctgctttaaggtcatgccattattgcgcaactgaataccaacgaggaaaagtagcaaaattaacgtgtattcactggcttcggtcgcgtgttgtaagaaagccagtccacttagaccaatggcaaaaccaatcactactacgccgcacagttttagcgactccagcgccatcgcaatacgcgacgggagtttttcttgctgatggtggttgcgccacggcaggcctcgctccagccacatcagggcggcaatattacacagtaaaataacggtaatactgacggcagaataatgcagaatcgccaacaggttactggcgaggttatcgagaaacgccagactgatacccataaaaaagagaataaggtaaaccatccagcttaatagctgattaataacttttaacgcagcttgttggcgaagcggaatgaggtaacccacaatcaggggaaccagaatgattaacagcccagaaaacatgaaaacccagtccttgcaaagatgaagtcgaaatgcgcgatgacacactactgaaagcggaaggacgagtaaagttgcaattaaaaggaaatgttatgcataaggagcagtagagtattcgttttcatttaaagatattcttgcgctttaattacaaactgcaccgatgttggtggcgtcaaaatcgccgaggcgttccctgaaggccggggcagcccacatggatgtgggctgagggcgcgttttacagggatgttacctcgcgcccgacccggtagccgtaagggataagtcgagggcaccgcgcagcggcgattttgttcgccagagcccgggggtgcagggggcggcggcgattggccgccccctgcgcgctccttgcgccagtggcaatatgttgcttagctcatgaaaggagcgcaacaagatgatgaatcaacatataacaacatcttaaaaaaaggcctgacattacgccaggccttctgcgttaattaatcacgcttttccagcagggtccggtaaatcagaccaccgataatgccgccgacaattggcaccacccagaagaaccacagttgttctaatgcccagccgccctggaagatagcaaccgcggtgctgcgcgccgggttaacagaagtgttagtcaccggaatactaattaagtgaatcagggttaaggccagaccaatagcgatcggcgcaaaacctgccggcgcgaatttgtcggttgcgccgtggatcaccaacaggaaacctgcactcaataccagttcaactaccagcgcggaaagcatggaataaccgcctggtgaatgctcgccataaccgttagaagcaaaaccgctggctgccgcgtcaaaacccgttttaccactggcaattaaatacagcagcgccgctgcaacaataccgccgacaacctgggcaattacgtagccaacgacttcttttgccggaaaacgtccgccagcccataaaccaatagtgaccgccgggttaaaatgaccaccagaaatatgaccaacagcaaaggccatcgtcagaacggtcagaccgaacgccaacgccacgccggcaaaaccaatgcctaattccgggaagcctgcggccagtacagcactaccacagccaccaaaaacaagccagaaagtaccaaaacattcagctgctaattttctgaacatatccaccacaattaaaaattgaccctgtgaaaaatatggtcgttttatagggtcgtcgtaaaaaagtgacgacggaaataatgcgcggctattttaaaaacgaaggcgagtcattcaccagataaataaatccagtaaatttgatttagggcaacagcgggttgccccatatagtcatttgtctgattgacagtgtagtgcacgcaaaagatttaatcctttaggcgtaataaaaaataatttatcatgctaattatttgattttgttgtttttgcagacttatcagcaagagggagtataacgcgattattcgctcatttttcagacatttgccatgcttaaatgtgatgtcatcacgtattagcaaggcctttcccgttatactgccagcgtaaaggataagtcacatatttctggaggggatatgattcttgagcgcgttgaaattgtgggttttcgcggtatcaaccgtttgtcgttgatgctggaacaaaacaacgtcctgattggggagaacgcgtggggtaaatccagcttgctggacgccttaactctgctgctatcgccagaatcagatctctaccattttgagcgcgacgatttctggttcccgccgggagatatcaacgggcgagaacatcatctgcatattattttgaccttccgcgaatcgctgccaggccgacatcgggttcgccgttatcggccgctggaagcgtgctggacgccatgcaccgatggctatcaccgtattttttatcgtctggaaggggagagtgcggaagacggcagcgtgatgacactgcgcagttttctcgataaagacggacatccgattgatgtcgaggatattaacgatcaggcacgccatctggtgcgtttaatgccggtgctgcgcttgcgtgatgcccgttttatgcgccgtattcgtaacggcacggtgccaaatgtccctaatgtggaagtcaccgcgcgccagctcgatttcctcgcccgtgagttatcctcacatccgcaaaatctctctgatgggcagattcgtcagggactttccgcaatggtacagctgcttgagcattatttctctgagcagggggccggacaggcgcgatatcgtttaatgcggcggcgagccagcaatgagcaacgaagctggcgctatctggatatcatcaaccggatgattgaccgacctggtgggcgctcgtatcgggttattttgctcggcctatttgctactttgttgcaggcaaaaggcacattgcgactggataaagacgcccgtccattgttgctgatcgaagatccagaaacccgtttacaccccattatgctttcagttgcctggcatctgttgaatcttctgccattgcagcgcattgccaccaccaactcgggtgagttgctttcgttaacgccggtagagcatgtttgccgactggtacgtgagtcctcgcgcgttgccgcctggcgtctggggccgagtggcttgagtaccgaagatagccgacgcatatcctttcacattcgttttaaccgtccgtcatcgctgtttgcacgctgctggttgctggtggaaggggaaacggaaacctgggttatcaatgaactggcgcgtcagtgcggacatcattttgatgccgaagggatcaaggtcattgagtttgcccagtccgggctaaagccactggttaaatttgcccgccgaatggggattgaatggcatgtactggtcgatggcgatgaagcagggaagaaatatgccgctacggtacgcagcctgttgaataacgatcgggaagccgaacgagaacatttaacggcgttaccggcgctggatatggaacattttatgtatcgccagggattttccgatgtgttccaccgcatggcgcaaatcccggaaaatgtaccgatgaatctacgcaaaattatctcgaaagcgatccatcgctcttccaaacccgatcttgccattgaagtggcaatggaggcaggacgtcgtggtgtggactccgtaccgacgctgctgaaaaaaatgttctcacgcgtgctgtggctggcgcgcggtcgcgcggattaaccgcgaaacatcgtggccatttgtggctgaatagcgtcgagcatctcatagcgccgacggtattcagcccgttttttactggcgatttcggcaatctcttttcgtgctatctgtgctggaaggcggtaatggcgttcagcatcacatacgccgccaaccgattcccagaaagcgttgtaatcagcgtggatcttgccttctttatcgcgataacgcaggctgcggtaaatatgcgtttcattgctgacggcaataatctgctctacctgcaaacgttgggcaaacagacaggccgcttccatcacgaggcgtttgggaaatagcccgtggcaggctttcgtcgcattctggatttcctgatgtggaatttcccattttgcgccttgcagtccgccaataaacatcgttcttttcccctgatattcacacagggtaaacgtgatctctgccagaggaataccttcgctgttgcggaacaggattgtgctgtcaccttctttatccattgagatcatcatggtcagctcaagcgtgaactgctcgccgtttttgccttccagcttcgccagttgcagcccgggggtattcaaatataagctgaattcttccgccgacatacattcgcggagtaacgcataatggtaacgtaacgcctccagcaattgcttacggctaagattcgccgcaaggtaagggcgatgcagacgcacaggcagtcgcggctggcgcgttaacaatacattgagattaggccagtgggaaagttcgttcatccactcaacgcttaaacgcggcataatcaacgagcgcagcaaaaatttctggcgaaaactacggcgatgccagaatttacccggccgacactgtccacgtgccagactaagaaaaagtgacaggctgctgagagattcagatggcgtaaaggtccgttcagttagctgcgacatattcatgaaatcaatggttatacatggcgtcgatttcaccattgcgtatcttaaccaaacatcaatagtgtgattactaacgtaaattttagggttttgttgatatttcgttgaagttaatgacccggattggcatatggagtattcagaaaatttatgaaaaagcggaaaaccgtgaagaagcgttacgttattgcgctggtgatagtcatcgccggactgattacgttatggagaattcttaacgcacccgtgccgacttatcagacgctgattgtgcgccccggtgatttacagcaaagcgtgctggcgaccggaaagctggacgcgctgcgtaaggttgatgtgggcgcgcaggtcagcggtcagttgaaaactctgtcggtggcgattggcgataaagtaaaaaaagaccagcttttaggggttattgatcctgaacaggctgaaaaccagattaaggaggtcgaagcaacgctgatggagctacgtgcgcagcggcagcaggcggaagcggagctgaaactggcgcgggtgacgtattcccgtcagcaacgtctggcacaaacgaaggctgtttcacagcaggatctcgacaccgccgcgacggagatggctgtgaaacaggcgcaaattggcaccattgacgcgcaaatcaagcgcaatcaggcttctctcgatacggctaaaaccaatctcgattacactcgcatcgttgccccgatggccggggaagtcacgcaaatcaccactctgcaaggccagacggtgattgccgcacaacaagcaccgaacattctgacgctggcagatatgagcgccatgctggtaaaagcgcaggtttctgaagcggatgtaatccacctgaagccggggcaaaaagcctggtttacggtgcttggcgatccactgacgcgctacgaggggcaaatcaaggatgtactaccgacgccggaaaaggttaacgacgctattttctattacgcccgttttgaagtccccaaccccaatggtttgctgcggctggatatgactgcgcaagtgcatattcagctcaccgatgtgaaaaatgtgctgacgatccctctgtcggcgttaggcgatccggttggcgataatcgttataaagtcaaattgttgcgtaatggtgaaacacgcgagcgtgaagtgacgattggcgcacgtaacgataccgatgttgagattgtcaaagggcttgaagcgggcgatgaagtggtgattggtgaggccaaaccaggagctgcacaatgacgcctttgctcgaattaaaggatattcgtcgcagctatcctgccggtgatgagcaggttgaggtgctgaagggcatcagcctcgatatttatgcgggtgagatggtcgcgattgttggcgcttcgggttccggtaaatcgaccctgatgaatattctcggctgtctggataaggccaccagcggcacctatcgcgtcgccggtcaggatgttgccacgctggacgccgatgcgctggcgcaactgcgccgcgagcatttcggctttattttccagcgttaccatttgctttcgcatttaaccgccgagcagaacgttgaagtacccgccgtctatgctggtcttgagcggaaacagcgactgcttcgtgcccaggagttgctgcaacggctggggctggaagaccgtacagagtattatccggcacagctttcgggtggtcagcaacagcgcgtcagcatcgcgcgggcattgatgaacggtggtcaggtaattcttgccgatgaaccaaccggcgcactggacagccattctggcgaagaggtgatggcgatcctgcatcagctgcgcgatcgtgggcatacggtgattatcgtcacccacgatccgcaggtcgctgctcaggccgagcgggtgatcgaaattcgcgacggcgaaattgtgcgcaatcctcccgccattgaaaaagtgaatgttactggcgggacggaacctgttgtcaacacggtgtctggctggcggcagtttgtcagcggttttaacgaggcgctgacgatggcatggcgggcgctggcagcgaataaaatgcgtactttactgaccatgctggggattattatcggtattgcgtcggtggtttccattgtcgtggtgggtgacgccgccaaacaaatggtgctggcggatattcgttctattggtacgaatactattgatgtctatcccgggaaagattttggcgatgacgatccgcaatatcagcaggcgctgaagtacgacgacttaatcgccatccaaaaacaaccgtgggtcgcctcagccacacctgccgtctcgcaaaacctgcgcctgcgttataacaatgttgatgttgctgccagtgccaatggcgtgagcggcgattattttaatgtctatggcatgaccttcagtgaaggaaacacctttaatcaggagcagctgaacggtcgtgcgcaggtcgtggttctcgacagtaatactcgccgccagcttttcccccataaagcagatgtggttggcgaggtgattctggtcggcaatatgcccgccagagtcattggtgtggcggaagaaaaacagtcgatgtttggtagcagtaaagtgctgcgtgtctggctaccttacagcacgatgtccgggcgagttatgggccagtcgtggcttaactccattactgtcagggtgaaagaaggatttgacagcgccgaggcggaacagcaactcacgcgtttactttcactgcgccacggaaagaaggatttctttacctggaacatggacggcgtcttgaaaactgttgaaaagaccacacgtactttacaactgtttctgacgctggtggcggtgatttcgctggtggtgggcggtattggtgtaatgaatattatgctggtgtcagtgaccgagcggacgcgggaaattggcattcgcatggctgtaggtgcgcgagcaagcgatgttttgcaacagttcctgatcgaagccgtactggtttgcctggtcggtggcgcgttgggaataacactgtcactgttaattgctttcaccttgcagcttttcttacccggctgggagattggtttttcaccgttggcgctgctgctggcgtttctctgctcgacggtcaccgggattttatttggctggttacccgcacgaaatgcggcacgactggatccagtagatgctctggcacgagagtaatttttgagataaaaatgccagccgatcgggctggcattttgcctttaggatgtacacaatgagacagaagagctatgcgactgccgcttctacttcgacgggcacaataacactggcgtgattgccttttggcccctggtggacatcaaactgaacggattgtccagcttttagcgttctgtaaccatccatctgaatggtggaataatgagcgaaaatatcttcgccgccgccttcagggcagatgaaaccaaaccctttggcattgttgaaccacttaacagtacccttttccatgcttcgacatccttcgcaaatcttatacaagtaagatggaataaaccggggtcagagagggggctgttcaaaacctcgccaactctagaaatacaatttagagaattagggcgagccgtcaagcatttgacaggggacaaggggcaggtatgaatcaaaaatttgaagcagttaacgctattgacaggaatgtgacagatgtcgctgatgccaacgatagatgatagttatctatcatgtggagtagattggtcaggcaaataagctcttgtcagcggcagggcgttctgccgataaccgtaaccgaagatgataactgacaatgggtaaaacgaacgactggctggactttgatcaactggcggaagaaaaagttcgcgacgcgctaaaaccgccatctatgtataaagtgatattagtcaatgatgattacactccgatggagtttgttattgacgtgttacaaaaattcttttcttatgatgtagaacgtgcaacgcaattgatgctcgctgttcactaccaggggaaggccatttgcggagtctttaccgccgaggttgcagaaaccaaagtggcgatggtgaacaagtacgcgagggagaatgagcatccattgctgtgtacgctagaaaaagcctgaatgcaggcataaaaattgggggaggtgcctatgctcaatcaagaactggaactcagtttaaatatggctttcgccagagcgcgcgagcaccgtcatgagtttatgaccgtcgagcacttgttactggcgctgctcagtaacccatctgcccgggaggcgctggaagcgtgttctgtggatttggttgcgctccgtcaggaactggaagcctttattgaacaaaccacacccgttctgcctgccagtgaagaggagcgcgacacacagccgacgctgagttttcagcgtgtactgcaacgtgcggtcttccatgtccagtcctccggtcgcaatgaggttaccggtgcaaacgttctggtcgctatctttagcgaacaggagtcgcaggcggcatatctgttgcgtaaacatgaagtcagccgtctcgatgtggtgaactttatctctcatggcacgcgtaaagacgagccgacacagtcttctgatcctggcagccagccaaacagcgaagaacaagctggtggggaggaacgtatggagaatttcacgacgaacctgaatcagcttgcgcgcgtgggcggaatcgacccactgattggtcgtgagaaggagctggagcgtgctattcaggttctctgccgtcgccgtaaaaacaacccgctgctggtgggggaatctggtgtcggtaaaaccgcgattgcggaaggtcttgcctggcgaattgttcagggcgatgtgccggaagtgatggctgactgtacgatttactctctcgatatcggttctctgttagcgggcacaaaatatcgcggcgactttgaaaaacgttttaaagcgttgctcaagcagctggagcaggacactaacagcatcctgtttattgatgagatccacaccattatcggtgcgggtgcagcgtctggtggtcaggtcgatgcggctaacctaatcaaaccgttgctctccagcggtaaaattcgtgtaattggttcgacaacctatcaggagttcagcaacattttcgagaaagaccgtgctctggcgcgtcgcttccagaaaattgatattactgaaccgtcgatcgaagaaactgttcaaatcatcaatggcctgaaaccgaagtatgaagcgcaccacgacgtgcgttataccgcaaaagcggtgcgtgcggcggtagagctggcggtgaaatacattaacgatcgtcatctgccggataaagccattgatgttatcgacgaagcgggcgctcgcgcacgcctgatgccggtaagcaaacgcaagaaaaccgttaatgtggcggatattgagtccgtggtggcccgtattgcacgcattccagagaagagtgtttctcagagtgatcgtgataccctgaaaaacctcggcgatcgcttgaaaatgctggtcttcggtcaggataaagccattgaggcgctgactgaagccattaagatggcgcgtgcaggtttaggtcacgaacataaaccggttggttcgttcctgtttgccggccctaccggggtcgggaaaacagaggtgacggtacagctttcgaaagctttgggcattgagcttctgcgctttgatatgtccgagtatatggaacgccataccgtcagccgtcttattggtgcgcctccgggatacgttggttttgatcagggcggtttgctgactgatgcggtcatcaagcatccacatgcggtgctgctgctggacgaaatcgagaaagcgcacccggacgtgttcaatattctgttgcaggtgatggataacggtacgctgaccgataacaacggacgcaaagcagacttccgtaacgtggtgctggtgatgaccaccaacgccggggtacgggaaactgagcgcaaatccattggtcttatccaccaggataacagcaccgatgcgatggaagagatcaagaagatctttacaccggaattccgtaaccgtctcgacaacattatctggtttgatcatctgtcaaccgacgtgatccatcaggtggtggataaattcatcgtcgagttgcaggttcagctggatcagaaaggtgtttctctggaagtgagccaggaagcgcgtaactggctggccgagaaaggttacgaccgggcaatgggcgctcgtccgatggcgcgtgtcatccaggacaacctgaaaaaaccgctcgccaacgaactgctgtttggttcgctggtggacggcggtcaggtcaccgtcgcgctggataaagagaaaaatgagctgacttacggattccagagtgcacaaaagcacaaggcggaagcagcgcattaatctgattgttaggtaggttggtcaagtccgtaatctcgaaagaggttacggactttttgtttatggggtggaggaggttcagaccctttttttaatgatgatggtaagttgttgataattagtgctgcgggaaggtaaggataaaaaagggtgctgcaggagaatgggatggttttgctttattaacaacgggctaaacgtgtagtatttgagttcactgccgtacaggcagcttagaaattcacaggtaacatactccacccgcccaccatgttcactgccgtacagacagataaaatgcgaaaaaaaagctcgcactttcgtacgagctcttctttaaatatggcggtgagggggggattcgaacccccgatacgttgccgtatacacactttccaggcgtgctccttcagccactcggacacctcaccaaattgttttgctaccaaacctcatgggtggcaacggggcgctactatagggagttggagtaaaacggtcaagaagaattttaatgataattattgtttgctcatactgtaaacaagttgtgcagtatatctacatcgagacaagttacggacttatacttccaaagtacttcatacatatcacaaaataaaaaggccggttaaaccgaccttttactcgttctttctcttcgcccatcaggcggtaaaacaatcagcgactacggaagacaatgcggcctttgctcaggtcgtacggggtcagttcaacagtcactttgtcgcccgtcaggatgcggatgtagtttttgcgcattttaccggagatgtgtgcagtaaccacgtgaccgttttctaactctacgcggaacatggtattaggcaacgtttcaagaacggtaccttgcatttcaatattgtcttctttggccatctaatcctctggggtatcactaccgtaatttgaaccggcaagataatgccgaagttctgtaaataagtaaagatttgcgcgctaaatcgcaacaaacaggttcggcacattactccgaaaacacacggctaagccgcaccaaaagcgcaacgtataagggagcggtgagataaacgatgggcgttacctgacgcgaaaaattccttatcggcagcggggtaatgagcgtaaccaactctgcgaccgcaattataacactctggggagaaatgtgccgaaaacattcattcttgtggtgaaaacaagcatcgtggtacccagaaattattcggcaatcgtccgaggcgcatttgattgagataattaaggtaatcccggcggggaatttcgcaggcaccaagcgatgctgtgtgatcgttaaggacctggcagtcgataagcttaccgccatgaccgataaattcctcacagaataccagaagcgccgttttagacgcattttccatccggctgaacatggactcgccacaaaatagcgttccctgggccacgccgtacataccgccgacaagctcatcttcacgccagacttcaatggagtgggcatggccgagttcgtgaaggcgatggtaggcttcgaccacgccacgcgtgatccaggttccttcttcgcgatcgctggcacagccttcaatgacctgaccaaaagcgtaattcatcgtgacacgatagggcgagcgtttatgaaatcgcttcatactacggctgatatgcagtgattctggccatagcaccgcgcggggatcgggcgaccaccagaggatggggtcgcctggagaaaaccacggaaaaataccacgctggtaagccattaacaggcgcgcagggctaagatcgcccccaagtgccagcaggccgttaggctcacgtaatgcgccttccggggaagggaaggctattgaatggcgagaaagctgaaccaggcgcatgaccgcaaaactccacgcaagtcggatcgttcaataatagcttacaaaccctgcttgaactggtaataacgcccctgtctggcaagcagttctgcgtgagtaccttgctcaataatttgcccgttgtccatcactattatttgttggaaacgagagagtccgcgaagtcgatgggtgaccattaacaccgttttctcacgcatcatttctgcaagcaattcaaggatctggctttcggttgtggcatctaagccttcggtaggttcatccagcaacaccagtggcgcatcatgtaacagcgcacgggcgatagccagacggcgcagttcaccaccggagagctggcgtccgccttcacctaaccaactgttgagacctgcatcctcgagcagcttttccaggccaacgcgacgcaagatctccgacagagcctcatcactactgccaggcgaggcgagtaaaagattatcacgcagcgtggcgctaaacagatgcactcgctgaggaacaacgctgatggtctgtcgtagagccgcttcattcaggctggctatggggctatcgttaagcaaaatctcgccctgttgcgggtcccatgcgcgggtcagctgttgtaacagtgttgatttgccgcatccggttcgcccgagaatcgctatatgttccccggcgtttacctgaagagaaatccctttaagtgcctgttgagattgctccggataagtgaactgaacatcccgtaacgtcagcgaaacgcgatcggcaacacgagtttgggtatcaggaaaggtgacctccggtttttgatccgttaagtcagagatacgtacggcagaggcaatgacttgccccagatgctgaaatgcacccgttactggtgccagtgcttcaaacgcggctaacgcgcagaagacaaacagggcaattaacgcgccgggttgagcattgccgccaacgccgccagacgccatccacagcatcaggatcaccgctaacgcgccaatgagcagcattatcgcttgcgacaatgcggtcagttcagattgacggcgttgcgcttccagccattgaatttctgtattctctagttgcgtgcgataacgatcgctggcaccaaaaatggtcagctcagcttgcccttgcagccaggccgtcagttgttggcgatactgtccgcgaagatgagtcagattttgcccggtgctttttcccgcacgataaaacagcggtggcatcaggaaaagcgtcagtaacataatgccgcccagcgtaaaggcgagggtgaaatcaaggaaacttaacccgattgtcaccaccataatcaccacaaaagcgcccaccagcggcgagataacgcgcaggtaaagatgatcgagcgtatcaacatccgccaccacgcgattgagcaattcgccctgacgatagcgcgccagtccggcaggggagaggggcagcaatttgctgaaggtgtaaatgcgcagatgctgcaacacgcggaaagtcgcgtcgtgacttaccagacgttcaaaatagcgcccggcagtacgggtgattgctgcgccacgcacgcccgcagcgggtagcatatagttgaagctgtacagtccggcaacccccgcaaccgctgaggccgagaggaaccagccggaaagtgtcaacagaccgatactggcgagcagcgtcacaattgccagcacaataccaagacttaacatccatttatgacgtttatacagtgccagatagggtagcaaagcgcgcatttaaatctcctcctgacgatgggccagtaatgtggcgaatgggccaccagccacacttaattccgcgtaacgtccttgctcaataatccggccatcctgcataacccaaatgacatcccagtcagcaagatcttctaactggtgggtgaccattaacgttgtctggcgcagagaggcggcattcagcgcctccattacgcgctgttcactgtgagcatcaaggctggcagcgggttcatccaacagtaatagcgaacagggatttagtaacgcacgggccaccgccacgcgctgcgcctgccccacggaaaggcgggcagcctggtcgccaacaggcgtatcaacgccttgtgggaggagcggtagaaactcgctgacccaggcgttatccagcgctgcttgtaattcttgttcgctggcatcaggtcgcgccagtagtacgttatcccgcaatgttgctgccggtaattgtgggttttgcccaacccaggagagatgtttacgccatgattctggtgataaatcgcgtaattctatcccgttgattcgtagcgatccctgatatgagagaaaaccagaaagcgcgttcagcagtgagcttttacctgaaccgctgcgaccaaccaacaccgcacgttggcctgctggcaaagtaaagttcagcggtccggccagcgttttaccttccggcgacgtgataaacagctcctcggcctcaatggtcaccggatcggtcgatgctaattccgcctcaccacgttgcggatgggcgagcggggtttccataaacgttttcagactgtcagctgcgccaacagcctgggctttagcatgataaaacgtaccgagatcgcgtaatggctggaaaaactctggcgcaaggatcagggccagaaaacccgcagccagcgtcacaccggtatcgtagtgaccaaaatccagctcgccgagataggaaaaaccaaagtagaccgccaccagagcaattgacagcgaggtaaaaaattcgagaatgccggaggataaaaacgccagccgtagcacttccattgtccgttggcggaaatcttccgaagcagaacgaatactttcaatttcagcttcaccacgaccaaaaatacgcaatgtttccatgccgcgcaggcgatcgaggaaatgcccacttaagcgagcaagagcgagaaagttacgtcggttagcatcggcagcccccattccaaccagcgccataaacaacggaattaacggtgcagtgcccagcagaatgagcgccgcagcccagttagaggggaagattgccaccacaatcagcaacggcaccgacactgccagcgccatttgcggcagatagcgtgcatagtaatcatgcatatcgtcaatttgctcgagtaccagcgtcgcccagctccccgcaggtttaccctgaatccacgctggccctgcttgttgcagacggtcgagaacctgacggcggatggcaaagcggatatgctgcccggcgtgataacccacccgttcgcgtaaccagaccacccatgcgcgcagtacaaaggtcagaaccagtaacgtaaagggaagcagcagggcttcacggggaatattctccataatcatatgttgcagaattcgcgccatgaaccaggcctgggcaatgatcaatatgccgctcacaaagcccagcagacgagaaatattcagccaacgttgggagatgacgctttgctgttttaaccagcgggttaactctttttgacgagatttattcattgcacgcttagcaggtgagttatcagaattatttgcagagcaatgttacaacggggaaaaaataaaggcgacccatagtcgcatggtgtcgccttctttacttttgttactgatttgtaaaattattttgcgtcagctaaaccatcgaggtagcgttccgcatcaagtgctgccatgcagcctgtaccggccgaagtaatggcctggcgataaatgtgatccatcacgtcgcctgcggcaaagacgccaggaatgctggtctgggtggcattaccatgaatacccgactgtactttgatgtagccgttttccagttccagctgcccttcgaaaatcgcagtattcgggctgtgaccgatagcaacaaacagaccggcaacgtcgagtgactcgatgttatcgctgttttgcgtatcgcgcagacgaacgccagtgacacccatttgatcgccggtcacttcttccagcgtacggttggtgtgcagaatgatgttgccgttctccactttatccatcaggcgcttaatgaggattttttccgcgcggaaaccgtcacggcggtgaatcagatgcacttccgaagcgatgttagacagatacagcgcctcttcaaccgcggtattgccgccgccgatgaccgcaactttctggttgcgatagaagaaaccgtcgcaggttgcacaagcagaaaccccacggcctttaaaggcttcttcagagggcaggccgagatagcgtgcagaagctccggtggcaataatcagcgcgtcgcaagtgtattcgccgttatcgccattcagacggaacggacggttttgcagatccaccttgttgatatgatcaaaaatgatctcagtttcaaacttggtggcatgttcgtgcatgcgctccattaataacggaccggtcagatcgtttggatcgccaggccagttttccacttccgtggtggtggtcagttggccgcctttttccatgccggtaatcagcacaggttgcaggttggcgcgcgccgcgtagacagcagcggtgtatcccgccgggcctgaacccaggataagcagtttactgtgtttggtcgtgcccatgagatccccatagttgttggcagacaatgggcaggattgtagggaatttacagacgtaaaaaaagagtatgacgattttgttaacaatttgtgcaatcggcagcatcgataagcaggtcaaattctcccgtcattatcacctctgctacttaaatttcccgctttataagccgattaaatgatgaataaacgcccctgttaatgaatatctggcatgttgtactaaaaatcgatgttttgctttgacaatcccctggtgttttgcgaaaacattcgaggaagaaaaaaaacagtattcttatatgcgcataaccatgcatgtaaataccatgtttaccgtgctagtgaaatctacgtatggcgtggacagacgccattcgtgatgtcgatagctgccacaaggcaacggtcttctcaccgtagacccaggcattgcgcgccgtgaatcttcatgatttcggtctatcgtgacgggtagcgactctgaacagtgatgtttcagggtcagacaggagtagggaaggaatacagagagacaataataatggtagatagcaagaagcgccctggcaaagatctcgaccgtatcgatcgtaacattcttaatgagttgcaaaaggatgggcgtatttctaacgtcgagctttctaaacgtgtgggactttccccaacgccgtgccttgagcgtgtgcgtcggctggaaagacaagggtttattcagggctatacggcgctgcttaacccccattatctggatgcatcacttctggtattcgttgagattactctgaatcgtggcgcaccggatgtgtttgaacaattcaataccgctgtacaaaaacttgaagaaattcaggagtgtcatttagtatccggtgatttcgactacctgttgaaaacacgcgtgccggatatgtcagcctaccgtaagttgctgggggaaaccctgctgcgtctgcctggcgtcaatgacacacggacatacgttgttatggaagaagtcaagcagagtaatcgtctggttattaagacgcgctaacacggaacaggtgcaaaatcggcgtattttgattacactcctgttaatccatacagcaacagtactggggtaacctggtactgttgtccgttttagcatcgggcaggaaaagcctgtaacctggagagcctttcttgagccaggaatacattgaagacaaagaagtcacattgacaaagttaagtagcggccgccgccttctggaggcgttgctgatccttattgtcctgtttgccgtctggttgatggctgccttactaagctttaacccttcggaccccagctggtcgcaaacggcctggcatgaacctatccataatttaggtgggatgcccggtgcgtggttggcagatacgctgttctttatttttggcgtgatggcttacaccattcccgtcattattgtcggcggttgttggtttgcctggcgtcatcagtccagcgacgaatacattgattattttgccgtttcgctacgcatcattggcgttttggcgctcatccttacctcctgtggtctggcggcaatcaacgctgacgatatctggtattttgcctccggtggcgtcattggcagcttactaagcactacgctacaaccactgctacacagtagcgggggaactattgcgctgctctgcgtttgggcagcgggcctgacgttgttcaccggttggtcatgggtgaccattgctgaaaaactcggcggctggattttaaacattctcaccttcgccagtaatcgtacccgtcgcgatgatacctgggtcgatgaagatgagtatgaagacgacgaagagtatgaagatgaaaatcacggcaaacagcatgaatcacgccgtgcccgtattcttcgcggcgcgctagcgcgtcgtaaacggttggcggaaaaattcattaatccgatggggcggcaaacagacgctgcgttgttctccggtaagcggatggatgatgacgaagagattacctacactgcacgcggtgtggctgccgacccggacgacgtcctattttcgggcaatcgtgcaacgcagccagaatatgacgaatacgatccattattaaacggtgcgccaattaccgaacctgtcgctgtagcagctgctgctaccacggcgacacaaagctgggctgcgccggttgaacctgtgactcagacgccgcctgttgcctctgttgatgttccacctgcgcaacctacagtagcctggcagcctgtaccgggtccacaaacgggagagccggttattgctcctgcaccggaaggttacccacagcagtcacaatatgcgcagcctgcagtgcaatataatgagccgctgcaacaaccagtacagccgcagcagccgtattatgcacctgcagctgaacaacctgcgcaacagccgtattatgcccctgcgccagaacaaccggtggcaggtaacgcctggcaagccgaagagcagcaatccacttttgctccacagtctacataccagactgagcaaacttatcagcagccagccgctcaggagccgttgtaccaacagccgcaacccgttgaacagcagcctgttgtggagcctgaacccgttgtagaagagacaaaacccgcgcgtccgccgctttactactttgaagaagttgaagagaagcgagcccgtgaacgtgaacaacttgcggcctggtatcaaccgattccagaaccggttaaagaaccagaaccgatcaaatcttcgctgaaagcaccttctgttgcagcagtacctccagtagaagccgctgccgctgtttccccgctggcatctggcgtgaaaaaagcgacactggcgacgggggctgccgcaaccgttgccgcgccagtcttcagtctggcaaatagcggtggaccgcgtcctcaggtcaaagaggggattggtccgcagttgccacgaccgaaacgtatccgcgtgccaactcgtcgtgaactggcgtcttacggtattaagctgccctcacagcgtgcggcggaagaaaaagcccgtgaagcccagcgcaatcagtacgattctggcgatcagtacaacgatgatgaaatcgatgcgatgcagcaggatgaactggcacgtcagttcgcccagacacagcagcaacgctatggcgaacagtatcaacatgatgtgcccgtaaacgcagaagatgcagatgctgcggcagaggctgaactggctcgtcagtttgcgcaaactcaacaacaacgttattccggcgaacaaccggctggggcgaatccgttctcgctggatgattttgaattttcgccaatgaaagcgttgctggatgatggtccacacgaaccgttgtttacgccaattgttgaacctgtacagcagccgcaacaaccggttgcaccgcagcagcaatatcagcagccgcaacaaccagttccgccgcagccgcagtatcagcagccacaacagccggttgcgccgcagccacaatatcagcagccgcaacaaccggttgcgccacagcagcaatatcagcagccgcaacaaccggttgcgccgcagcagcagtatcagcagccacaacagccagttgcgccacaaccgcaggataccctgcttcatccgctgttgatgcgtaatggcgacagccgtccgttgcataaaccgacgacgccgctgccttctctggatttgctgacaccgccgccgagcgaagtggagccggtagatacctttgcgcttgaacaaatggctcgcctggtggaagcgcgtctggctgatttccgtattaaagccgatgtcgtcaattactctccggggccggttatcactcgctttgaattgaacctggcaccgggcgtaaaagcggcgcgcatttctaacttgtcacgggaccttgcccgttcactttcgacggtggcggtgcgtgtcgttgaagttattcctggcaaaccctatgtaggtctggagttaccgaataaaaaacgacaaaccgtttatctgcgcgaagttttggataacgccaaattccgcgataatccgtcgccattaaccgtggtgctgggtaaagatatcgccggtgagccggtggttgccgatctggcgaaaatgccgcacttgttggttgcggggactaccggttccggtaaatctgtcggtgtgaacgcgatgatcctgagcatgctttataaagcacagccagaagatgtgcgtttcatcatgatcgacccgaaaatgctggagctttcggtttatgaaggcattccgcatctgttaacggaagtcgttactgatatgaaagatgccgccaacgcgctgcgctggtgtgttaacgagatggagcgtcggtataaactgatgtctgcgctgggtgtgcgtaatctggcgggttataacgaaaaaattgctgaagccgatcgcatgatgcgtccgattccagacccgtactggaagccgggtgacagtatggatgcccagcatccggtgctgaaaaaagaaccatacattgtggtgttggttgacgaatttgccgacctgatgatgacggtaggtaaaaaagtggaagagctgatagcacgtctggcgcaaaaagcccgtgccgcgggtatccacctcgtactggcaactcagcgtccatcggttgatgttattactggtctgattaaagcgaatattccgacccgtatcgcctttaccgtatccagtaagattgactcacgtaccattcttgatcaggctggcgcggaatcactgctgggtatgggggatatgctctactctgggccgaactccacgttgccggtacgtgtccatggtgcttttgttcgcgatcaggaagttcatgccgtggtgcaggactggaaagcgcgtggtcgcccacagtatgttgatggcatcacctccgacagcgaaagcgaaggtggtgcgggtggtttcgatggcgctgaagaactggatccgttgttcgatcaggcggtgcagtttgtcactgaaaaacgcaaagcgtcaatttctggcgtacagcgtcagttccgcattggttataaccgtgcagcgcgtattatcgaacagatggaagcgcaggggattgtcagcgaacaggggcacaacggtaatcgtgaagtgctggccccaccgccgtttgactaactaatgcatcgtatgccggataaggcgcggtagcgtcgcatccggcactctatcaactgaaaattcagtattttcttctttcctcaagctgattattagcctggaatagagagtagagggaactcccgatcgggagtgacgtaatttgaggaataatgatgaaaaaaattgccatcacctgtgcattactctcaagcttagtagcaagcagcgtttgggctgatgccgcaagcgatctgaaaagccgcctggataaagtcagcagcttccacgccagcttcacacaaaaagtgactgacggtagcggcgcggcggtgcaggaaggtcagggcgatctgtgggtgaaacgtccaaacttattcaactggcatatgacacaacctgatgaaagcattctggtttctgacggtaaaacactgtggttctataacccgttcgttgagcaagctacggcaacctggctgaaagatgccaccggtaatacgccgtttatgctgattgcccgcaaccagtccagcgactggcagcagtacaatatcaaacagaatggcgatgactttgtcctgacgccgaaagccagcaatggcaatctgaagcagttcaccattaacgtgggacgtgatggcacaatccatcagtttagcgcggtggagcaggacgatcagcgcagcagttatcaactgaaatcccagcaaaatggggctgtggatgcagcgaaatttaccttcaccccgccgcaaggcgtcacggtagatgatcaacgtaagtagaggcacctgagtgagcaatctgtcgctcgatttttcggataatacttttcaacctctggccgcgcgtatgcggccagaaaatttagcacagtatatcggccagcaacatttgctggctgcggggaagccgttgccgcgcgctatcgaagccgggcatttacattctatgatcctctgggggccgccgggtaccggcaaaacaactctcgctgaagtgattgcccgctatgcgaacgctgatgtggaacgtatttctgccgtcacctctggcgtgaaagagattcgcgaggcgatcgagcgcgcccggcaaaaccgcaatgcaggtcgccgcactattctttttgttgacgaagttcaccgtttcaacaaaagccagcaggatgcatttctgccacatattgaagacggcaccatcacttttattggcgcaaccactgaaaacccgtcgtttgagcttaattcggcactgctttcccgtgcccgtgtctatctgttgaaatccctgagtacagaggatattgagcaagtactaactcaggcgatggaagacaaaacccgtggctatggtggtcaggatattgttctgccagatgaaacacgacgcgccattgctgaactggtgaatggcgacgcgcgccgggcgttaaatacgctggaaatgatggcggatatggccgaagtcgatgatagcggtaagcgggtcctgaagcctgaattactgaccgaaatcgccggtgaacgtagcgcccgctttgataacaaaggcgatcgcttttacgatctgatttccgcactgcataagtcggtacgtggtagcgcacccgatgcggcgctgtactggtatgcgcgaattattaccgctggtggcgatccgttatatgtcgcgcgtcgctgtctggcgattgcgtctgaagacgtcggtaatgccgatccacgggcgatgcaggtggcaattgcggcctgggattgctttactcgcgttggcccggcggaaggtgaacgcgccattgctcaggcgattgtttacctggcctgcgcgccaaaaagcaacgctgtctacactgcgtttaaagccgcgctggccgatgctcgcgaacgcccggattatgacgtgccggttcatttgcgtaatgcgccgacgaaattaatgaaggaaatgggctacgggcaggaatatcgttacgctcatgatgaagcaaacgcttatgctgccggtgaggtttacttcccgccggaaatagcacaaacacgctattatttcccgacaaacaggggccttgaaggcaagattggcgaaaagctcgcctggctggctgaacaggatcaaaatagccccataaaacgctaccgttaatgttatcgttgcggtaatgttgttactgtatccctgtggtcgcaggctgtggccacatctcccatttaattcgataagcacaggataagcatgctcgatcccaatctgctgcgtaatgagccagacgcagtcgctgaaaaactggcacgccggggctttaagctggatgtagataagctgggcgctcttgaagagcgtcgtaaagtattgcaggtcaaaacggaaaacctgcaagcggagcgtaactcccgatcgaaatccattggccaggcgaaagcgcgcggggaagatatcgagcctttacgtctggaagtgaacaaactgggcgaagagctggatgcagcaaaagccgagctggatgctttacaggctgaaattcgcgatatcgcgctgaccatccctaacctgcctgcagatgaagtgccggtaggtaaagacgaaaatgacaacgttgaagtcagccgctggggtaccccgcgtgagtttgactttgaagttcgtgaccacgtgacgctgggtgaaatgcactctggcctcgactttgcagctgcagttaagctgactggttcccgctttgtggtaatgaaagggcagattgctcgcatgcaccgcgcactgtcgcagtttatgctggatctgcataccgaacagcatggctacagtgagaactatgttccgtacctggttaaccaggacacgctgtacggtacgggtcaactgccgaaatttgctggcgatctgttccatactcgtccgctggaagaagaagcagacaccagtaactatgcgctgatcccaacggcagaagttccgctgactaacctggtgcgcggtgaaatcatcgatgaagatgatctgccaattaagatgaccgcccacaccccatgcttccgttctgaagccggttcatatggtcgtgacacccgtggtctgatccgtatgcaccagttcgacaaagttgaaatggtgcagatcgtgcgcccagaagactcaatggcggcgctggaagagatgactggtcatgcagaaaaagtcctgcagttgctgggcctgccgtaccgtaaaatcatcctttgcactggcgacatgggctttggcgcttgcaaaacttacgacctggaagtatggatcccggcacagaacacctaccgtgagatctcttcctgctccaacgtttgggatttccaggcacgtcgtatgcaggcacgttgccgcagcaagtcggacaagaaaacccgtctggttcataccctgaacggttctggtctggctgttggtcgtacgctggttgcagtaatggaaaactatcagcaggctgatggtcgtattgaagtaccagaagttctgcgtccgtatatgaacggactggaatatattggctaatacccaatttttctgaatctaaaaagcgcctgcgggcgctttttttgtctccctttgataccgaacaataattactcctcacttacacgtaatactactttcgagtgaaaatctacctatctctttgattttcaaattattcgatgtatacaagcctatatagcgaactgctatagaaataattacacaatacggtttgttactggaatcaatcgtgagcaagcttgagtgagccattatgaaaacgaaaatccctgatgcggtattggctgctgaggtgagtcgccgtggtttggtaaaaacgacagcgatcggcggcctggcaatggccagcagcgcattaacattaccttttagtcggattgcgcacgctgtcgatagcgccattccaacaaaatcagacgaaaaggttatctggagcgcctgtacagttaactgtggtagtcgctgcccgctacgtatgcacgtcgtggacggtgaaatcaaatatgtcgaaacggacaataccggcgatgacaattacgacggcctgcaccaggttcgcgcctgcctgcgtgggcgttccatgcgtcgccgtgtctacaatccggaccgcctgaaatatccgatgaaacgagtcggggcgcgcggtgaaggcaaattcgagcgcattagctgggaagaagcctacgacatcatcgcgaccaatatgcagcgcctgatcaaagagtacggcaacgagtctatctatctgaactatggcaccggtacgctgggcggcaccatgacccgctcctggccgccgggaaataccctggtcgcgcggctgatgaactgctgcggcggctatctgaaccattacggcgactactcctccgcgcaaattgcggaaggtttgaactatacctacggcggctgggcagatggcaacagcccgtcggatatcgaaaacagtaagctggtagtgctgtttggtaataaccctggcgaaacgcgaatgagtggcggtggggtgacttactatcttgaacaggcacgccagaaatctaatgcccgcatgatcatcatcgatccgcgctataccgacaccggtgccgggcgcgaagatgagtggatccctattcgtccgggaacagatgccgcactggttaacggtctggcgtacgtcatgatcactgaaaacctggtggatcaggcattcctcgataaatattgcgttggctacgatgagaaaaccctgccagccagtgcgccgaaaaatggccactataaagcttatattctgggtgaagggccagatggcgtggctaaaacgccggaatgggcctcgcaaatcactggtgttccggcagacaaaatcatcaaattggctcgtgaaatcggtagtaccaaaccggcgtttatcagccagggatggggcccgcagcgtcacgctaacggtgaaatcgcaacccgtgctatctcgatgctggcgattctgaccggtaacgttggtattaacggaggcaacagcggcgcgcgtgaaggttcatacagcttaccgtttgtccgtatgccgaccttggaaaacccgatccagaccagcatttcgatgtttatgtggaccgatgccattgaacgtggcccggaaatgacggcgctgcgtgatggtgtacgcgggaaagataagctggatgtgccgatcaaaatgatctggaactatgccggtaactgcctgattaaccagcattctgaaatcaaccgtacccatgaaatccttcaggatgataagaagtgcgagctgattgtggttatcgactgccacatgacctcatcggcgaaatatgctgacatcctgctgcctgactgcaccgcttccgaacagatggactttgcgctggatgcatcctgcgggaatatgtcttacgtgattttcaacgatcaggtgattaaaccgcgctttgaatgtaagaccatctatgaaatgaccagcgaactggcaaaacgtcttggcgttgagcaacagtttactgaaggccgtacccaggaagagtggatgcggcatctgtatgcccagtcgcgggaagcgattcctgaactgccaacgtttgaagagttccgcaagcaggggatctttaaaaagcgcgacccacaagggcatcacgttgcttataaagccttccgtgaagatccgcaggcaaacccactgactacgccatcgggcaaaattgagatttattcgcaggcgctggctgacattgccgctacctgggaattgcctgaaggcgatgtgatcgatccactgccgatctacacgccgggctttgaaagttatcaggatccgctgaacaaacagtatccgctgcagcttacaggtttccactataaatctcgcgttcactcaacttacggcaacgttgatgtgctgaaagcggcttgccgtcaggaaatgtggatcaacccgcttgatgcccaaaaacgcggtatccacaacggcgataaagtcaggatctttaacgatcgtggtgaggttcatattgaggcgaaagtgacgccacgaatgatgccgggtgtggtcgcactgggtgaaggtgcctggtatgacccggatgcaaaacgtgtcgataagggtggttgtattaacgtactgaccactcaacgtccgtctcctctcgctaaggggaatccgtcacatacaaaccttgttcaggttgaaaaggtgtaaggagtaaccgatgacaacccagtatggattttttattgattccagccgttgcaccggttgcaaaacctgcgagctggcctgtaaagactacaaagatttgacgccagaagtcagcttccgccgcatttatgaatatgctggcggcgactggcaggaagataacggtgtctggcaccagaacgtgtttgcctactatctgtcgatttcatgtaaccactgcgaagatccggcttgtactaaagtctgcccgagcggtgcgatgcataaacgtgaagatggttttgttgtggtcgatgaagatgtgtgcattggctgccgctactgccatatggcttgcccgtatggcgcaccgcaatataacgaaacgaaaggccatatgaccaaatgcgatggttgttatgaccgtgttgcggagggtaaaaagccgatctgtgttgaatcttgtccgctgcgggcgctggatttcggccctatcgacgagctgcgtaaaaaacatggcgatctggcggccgttgcgccgttgccgcgagctcactttaccaaaccgaatattgtgatcaaacccaatgccaatagccgcccgaccggggataccactggctatctggcaaacccgaaggaggtgtgagatgggaagtggatggcatgaatggccgctgatgatcttcacggtcttcgggcaatgtgtagcaggtggttttatcgttctggctttggcgctgctcaaaggcgacctgcgagcagaagcccagcagcgtgttatcgcctgcatgtttggtttatgggtgctgatgggcattggctttatcgcctctatgctccatcttggttcaccaatgcgcgcttttaactcgctcaaccgggtaggggcttcagcactcagtaacgaaatcgccagcggttcgatcttttttgccgtaggcggcatcggctggttgctggcaatgctgaaaaagctgtcaccggcattgcgtacgctgtggctgatagtgacgatggttcttggcgtcatctttgtctggatgatggtgcgtgtgtataacagcattgataccgttccgacctggtacagcatctggacgccgatgggcttcttcctgacgatgtttatgggcggcccgttactgggttacctgttgttgagtctggctggcgtcgatggctgggcgatgcgtctgctgccagcaatttctgtactggcactggtagtgagtggcgtggtgtcagtgatgcagggcgcagagctggcgactattcatagttctgtgcagcaggccgcagcgctggtgccggactatggtgcgctgatgtcctggcggatcgtgcttttggccgttgccctgtgcttgtggattgcaccacagctaaaaggttatcagcctgcggttccgctactttctgtatcattcattctgcttctggcaggggaattaatcggtcgcggcgtattctatggtttgcatatgaccgtggggatggccgtcgcaagctaatcataacaaccggggtttcggccccggttctcttttatttctgcttcgttaacgtgtcataactggtcatcaaattacgataatcaggaatgtggttagagaacaacgtcgccagtccttcaatatcattacgccagtcgcgatgcagctcgcacgccacgccgaaccatgtcatcaattgcgcaccagcttgcgacaagcgatcccatgccgaatgccgggtaatttcattaaaggtccctgacgcgtcagtcacgacaaagacgtcaaacccttcttcaatggctgaaagcgccgggaatgccacgcaaacttcggttaccacaccggcaataattaactgttttttacctgtcgctttgacagcttttacaaaatcttcgttatcccaggcgttaatatttcccgggcgagcaatgtaaggtgtatcggggaattgtgctttcagttctggaactaatgggccgttaggaccggtttcaaaactggtggtaagaatagttggtaagttgaaatacttagccaggtcacccagcgccagcacgttatttttaaacttatcgggttcgatatcccgtacaagggaaagtaaaccagcctggtgatcaacaagcaaaacggcagcatcatttttatcaagacgaacatacggtttggtcatcctcttctcctttcgagagtcagtggtacgtctgaaatcgatcagacgcgatgcattgctctgaaagcatagacgggaaatatgagtttgctgtgaccatgaaatttttcgactgaacgaagcgtatgaaatttgtgttagttcaataaaaacaatcagatgagactaatcatctcttcagcattagcgttatgaatgagtaatataaatcgataataccgccgctgggatatcgcgtattttcacccattgacaatgtttttggcggtggcatgatgcgcatgaaatttgaacttcctcacggttttaattcatgtccacgtatacccagcctgtcatgcttttgctgtctggcctgcttttgttgactctggcgattgcggtgttaaatacactcgtgccgctttggctcgcccaggaacacatgtccacatggcaggtaggcgttgtcagctcatcctattttaccggcaaccttgtcggtacattgctgacagggtatgtcattaagcgcattggctttaaccgcagctattatctggcctccttcatttttgccgctggctgtgccggccttggcctgatgattggattctggagctggttggcttggcgttttgtcgcgggcgtcggctgtgccatgatttgggtggttgttgagagcgcgctgatgtgcagtgggacgtcacgtaaccgtgggcgtttgcttgctgcgtatatgatggtttattacgtgggaacgtttttaggccagttactggtcagcaaagtttcaaccgagctgatgtccgtattgccgtgggttacaggtttgacgttggcagggatcttaccgctgttgtttacgcgtgtgctgaatcagcaggctgaaaaccatgattcgacgtcaattacgtcaatgctaaaactccgtcaggcgcggcttggcgtgaatggctgcattatctcaggaatcgttctgggatctctatatggcctgatgccgctgtacctcaatcacaaaggggtgagcaatgccagcattggtttctggatggcggtactggtcagtgcgggtatccttggacaatggccgattggacgtctggcggataagtttggtcgactgctggtgttgcgtgttcaggtctttgtcgtcattctcggcagtatcgcgatgcttagccaggcggcgatggccccagcgttattcatcctcggtgccgctggctttacgctatatccggtggcgatggcatgggcttgcgagaaagttgaacatcatcaactggtggcgatgaaccaggccttactgttgagctatactgtgggaagtctgcttggcccgtcatttaccgctatgctaatgcagaatttctccgataatttattgtttatcatgatcgccagcgtatcgtttatctatttgctgatgctgctgcgcaacgccggtcatacgccgaaacccgttgctcacgtgtaaatgaattcaagcagagtgtgaacttactgtttcacactctgcttttttgtttcttctatctgacttgctttattccaaattttattcgtttaaaaataaaatgtgcagcaggttataattttgcatttcgctatttccgcacttcttatttgccgcgcataatccctcgttttaccgatgcccctttaattttggcgaaggatttgtctatggctgggaatgttcaggaaaaacagttgcgatggtacaacattgcgctgatgtcttttatcactgtctggggttttggcaacgttgttaataactatgccaaccaggggctggtggttgttttttcatgggtgtttatctttgcactctatttcacaccttatgcgctaattgttggtcagttaggctcgaccttcaaagatgggaagggcggggtcagtacctggattaaacacacgatgggacccggactggcttatctcgccgcgtggacctactgggtggtgcatattccctatctggcacaaaaaccccaggcaattctgattgcgctcggttgggcgatgaaaggcgacggttcgctaatcaaagaatattcagtcgtagcgttacaggggttaacgctggtgctgtttatcttctttatgtgggttgcttcacgcggtatgaaatcgctgaaaatcgtcggttctgtggcagggattgctatgtttgttatgtcactcctgtatgtggcgatggcggtaaccgcgcctgcaattactgaagtgcatattgcgaccacaaacattacctgggaaacgttcattcctcatatcgactttacctacattaccactatttcaatgctggttttcgcggttggcggagcagagaagatttctccttacgttaatcaaacgcgcaacccaggaaaagaatttccaaaagggatgttatgcctggcggtgatggttgcggtttgtgccattctgggctcgctggcgatggggatgatgtttgattcgcgtaatatcccggatgacttaatgaccaacggtcagtattacgcctttcagaagctgggcgagtattacaacatgggtaatactttaatggtgatttacgccattgcgaataccctgggacaagtagcggcgctggtattctcgattgatgccccgcttaaagtgctattaggtgatgctgacagcaaatatattccagccagtttatgtcgtaccaacgcttctggtacgcccgttaatggctattttctgaccctggtactggtggcgattctgattatgctgccgactctcggcattggtgatatgaacaatctctataaatggctgttgaaccttaattcggtagtgatgccgctgcgttatttatgggtatttgttgcatttattgcagtcgttcgcttggcgcagaaatataaaccagaatatgtctttattcgtaataagcctctggcaatgaccgtcgggatttggtgttttgcctttaccgcctttgcctgtttgacggggatcttcccgaaaatggaagccttcactgcagagtggaccttccagttggcgctgaatgttgcaacgccgtttgtgctggtaggattaggactgatattcccgctgctggcgcgtaaagcgaatagtaaataattattgtggtcggtgacgctgactctggcagatctgacccgtttttacataatcgagaaatgcgcgcaagccgcaggacatatactggcggtttggataatagatctggaagcctggacgctctgtgctccagtcttccagtacacattctaaacgaccagtatcaaggtactccttgatctgttcatagagcagatacccgataccagcacccatcaaaacggcctccagttcagcatcaacatcatccagaatgatatttcctgcgacagcaatttccagctcctttgcaaattgccagtggaaaggtttgccgctgggataacgaaaaacaacacattgatgattaagcagatcatgaggatggcggggtttgccatatcttgcaaagtactctggcgttgctgctacacataatttcactggcgggccgatcgccacgctgatcatatctttttcgacgatgcaactaagtcgaacgccagcgtcaaagccctgttggacgatatcgacaagagagtcgtcagttgtgagctcgactttaatatcaggatattcacgtgtgaaaccaaccagtaaagacattaaaaatatacgtgcagctacccgggcggcattgattttgagcgttcctgtcggtgtcagacgaaaatcattcatctcatctaacatgatctgaatttcgtcgaaagctgggcgcaatcgttcatagagattagaacccgcttccgttaacgatacgcttcgggttgtccgattgaataagcgaattttaagacgttgttccagtgttttaatactatggctaatggcggacgaggataagcctaactcatcgcccgctgcacgaaagctttgattacgggccacggcaaagaaagtggcaaagtcagacatattcatccgcattagtgaaaatccttcattaactcatcctgaatcatcacgtttacaggattatgccgcctgcgtaaagtgcgctccagaacttaacgtggaggtaaaattatgcagtctgaacgtatttatttggtatgggcccatcctcgtcatgattcattgaccgcacatattgctgatgcgatccatcagcgggcaatggagcggaaaatacaggtgacggaactcgatttatatcggcgtaatttcaacccagtgatgacgccggaagatgaaccagactggaagaatatggataaacgttattctccagaggttcatcagctttattcagagctgcttgaacatgacacgttagtggtggtttttcctctctggtggtacagcttcccggcaatgctaaaaggatatattgacagagtatggaataatgggctggcttatggagatgggcacaaattaccattcaataaagttcgttgggtggcgctggttggaggagacaaagaatcatttgtccagatgggctgggaaaaaaatataagcgattatttaaaaaatatgtgcagttatcttggtattgaagatgccgatgtcactttcttgtgtaatacagtggtattcgatggggaagaacttcacgcgagctattatcagtcgttattatctcaggtacgggatatggtagatgcactataagatgtgttaaaaacgctgtagcagaatgaagcgcggaataaaaaagcggcaactcaataaagttgccgctttacggggaaattagaacattaccttatgaccgtactgctcaagaatgcctttcacgcgttccatggtctctttcttcggtggtttaacaccgtcgagtttgtactcttcacccattgccacccatttgtgtttgcccagctcgtggtaggggagaagctcgattttctcaacgttgcccatatcacgggtaaattcaccgaggcgatgcgctgaatcgtcatcgtcagaccagcctgggacaacaacgtagcggatccacaccttcacatttttgttcgccagatatttagcgaactccagcgtgcggtggttggaaactccaaccagattttggtggatctcgtcgttcatctgtttgagatcgagcattaccaggtcggttacttccagcagttcatcaatcaccggatcgtaacgacgaacaaaaccgttggtgtccagacaggtatgaatgccttcttttttgcaggcgcggaaccagtcacgaacaaactcagcttgcaggattgcttcaccgccggatgcggtaacgccgccgccggaagcgttcataaagtggcgataggtcaccacttccttcatcaaatcttcaacggtaacttctttaccgccatgcgtgtcccaggtgtcgcggttatgacaatacaggcagcgcatcaggcagccctggaaaaaggtgataaagcgaatacctgggccgtctacggttccacaggattcaaaggagtgaatgcgaccaataactgacattgcggtgtttctccagatgtggcccatctgaggccgtgttggtgcgcagctcgaaggctacgtcgagtctgttttggcagtcaccttaaagtatagatagctgacaaaaaaggctctcgcgctaaaaaaggccccactttcgtggagcctttattgtacgctttttactgtacgatttcagtcaaatctaattacatagattgagtgaaggtacgagtaataacgtcctgctgctgttctttagtcagcgagttgaaacgtactgcgtagccagatacacggatggtcagctgcggatatttttccgggttttccatcgcgtcgagcagcatttcacggttcatcacgttaacgttcaggtgctgaccaccttcgatggatgcttcgtggtggaagtaaccatccatcagaccagccaggttggtcttacgaacttcgtcgtctttacccagtgcgttcggaacgatagagaaggtgtaggagataccatctttagcgtaagcaaacggcagtttagcaacggaagtcagagaggctactgcacctttctggtcacgaccgtgcatcgggttagcacccggtccgaacggcgcgccagcacgacgaccgtctggggtgttacccgttttcttaccatacacaacgttagaagtgatggtcagaacagactgagtcgggatagcgtcacggtaggtgtgcagtttctgaattttcttcatgaaacgttctaccaggtcaacagccaggtcatctacacgcggatcattgttaccaaactgcgggtattcgccttcgatttcgaagtcgatagccagaccgtcttcgtcacgaatcggtttaactttcgcatatttgattgcagacagggagtcagcagcaacggacagaccagcgataccacacgccatggtgcggataacgtcacggtcgtgcagcgccatcagagaggcttcgtagctgtacttgtcgtgcatgtagtggatgatgttcagtgcagtgatgtactgtttagccagccagtccatgaagtgatccatgcgctccatcacttcatcatagttcaggacatcgcctttgatcggttcagacttcggaccaacctgcattttcagtttttcgtcaacgccgccgttgattgcgtacagcatggttttcgccaggtttgcacgcgcaccgaagaactgcatttgtttaccaacgatcatcgggcttacgcagcaagcaatagcgtagtcatcgttgttgaagtccggacgcatcaggtcatcgttctcatactgcagagaagaggtgtcgatggacactttagcggcgaatttcttgaagttcagcggcagtttttcagaccacagaatggtcatgttcggttccggagacggacccatggtgtacagggtgttcaggaaacggaagctgtttttggtaaccagggtacgaccgtcgaggcccataccaccgatagattcggttgcccagatcgggtcgccagagaacagttcatcgtattccggagtacgcaggaagcgaaccatacgcagtttcatgaccaggtggtcaaccatttcctgcgcttcttgttcggtgatcttgccagctttcaggtcacgttcgatgtacacatccaggaaggtggaggtacgaccgaaggacattgcagcaccgttctgagacttaacagcagccaggtagccgaagtaagtccactggatagcttcctgagcgttggtagccggaccagagatgtcgtagccgtatttcgcagccatttctttcatctgacccagagcgcggtgctgttcagcgatttcttcgcgcagacggatagtctgttccaggtttacgccgttttccagatcagcctgcagagaagtgaactgtgccagtttgtctttcatcaggtagtcgataccgtacagcgcaacgcgacggtagtcaccgatgatacggccacggccatatgcatctggcagaccggtcagaacaccagatttacggcaacgcaggatgtccggagtgtaaacgtcgaacacgccctggttgtgagttttacggtattcagtgaagatttttttgatcatcggatccagttcgcggttgtacgctttgcaggaaccttcgatcattttgataccaccgaacgggataagagcacgtttcagcggagcttcagtctgcagaccaacgattttctcaagctgcttgttgatgtagccagcgtcgtgagaggtgatggtggaagcaacagcggtgtcaaagtcaactggcgcgtgagtgcggttttccagtttaacgccttccattactttgtcccacagggtggtggtcgcttcagtagcgccagccaggaaggactcgtcaccctcgtacggagtgtagtttttctgaatgaagtcacggacgtttacttcattctgccagtcacctttggtaaaaccttcccaggctgtggctaacttttcattaagctcggacatgtaacacctaccttcttaagtggattttttatttactgcgtacttcgacaaccattaatggtggtcgttttcacgcaggtaaatgacccagtatgtcaacccaaccaacaaaccaccaccgataatgttgccgatcgtaaccggaatcaggttatcagtgatgaaattcatcacggtcaggtgagaaaaattttccggtgcagaaccgactgcggtccaaaattccggggatgcgaagtcgcggattacaatacccatcgggatcataaacatgtttgcgatactgtgctcaaaaccgctggcaacaaacatcgcgaccggcagcaccataatgaacgctttgtccatcaggctgcggccagaataactcatccatactgccagacataccatcaggtttgccaggataccaagacagacggcctcaataaaagtatggtgcactttgtggtcggcggtttgtaggacgtttagtccccattgaccatttgcggtcatatactcgccggaaagccacattaaaagtacaaacagcagtgcgccgaccaggttgccaaaatagacatttagccagtttttcgccaactgaccccaggtgatgcgcccactcgccttagcaacaacaatcaacacggtggaagtaaagagatcggctccgcagacaacacaaagaatcagccccagagagaagcaaatgccgccaaccagttttgccatgccgaagggcattgtgcctgtgccagtggttgctgtgatatagaagacgaatgcgattgagatgaaaacaccggcggtaatcgccagatagaaagtcttaagcggatgtttcgttgctttatagacacccgcctcttcggccactttggccattgcagcaggaagtaaaagatcaaaagggttgtcagctttcacactaactctctctttattaagtcggcgacgagatactaacaaagcattatagatgagaaattgatatagatcatatctcgcctggcttataggcccgtaactcgcatggtttttatgcaaatacggagtaaatatttgattatccaaataaaaataaattttaaaaattaacaaatgagttgaattttttccgcatcctccgctaaaacagttaattaaaagggagcatcaggcgaataaagtaacaatatcgatcgtatttattaaatacaaattaccgatatttaaccttataattacaattattttattaatgcaaatatatgtaaagcggggcattaaaaaaacgccccgtaatataactcagactaatcattaagcctacattgcgtaggctatttgattttattttgcccagaatgctgctttggcgcgctgcagcttttcgtaggccttcaacaacgactgatgtgcagcaaacgcgtgcagatcgctatctaccggttgcaggccgtaaaacgccgcttcgccgctcattgccgcactggcggcttctacggcatctgcgccgtacatgcgaacaaacgcattcagatattgcagcggctggcgatcttcttcctgtgccagtaataacaacgtttgcaggcagcgataatagttggcgcgttccggactaaatactgatgagttaaactccatcgtccattcggtccagaccagagcctgttccagatcgccaccagccagcgccagcatggcttttaattcaccgatacgcagggtgtaccaaccgttatccgacccggtcgccagacccaacagctcacgcacgcgggtaaagtcatcaaaaccttcttcatccagttgctcgatgaggttcaggtaatcttctttttcccactcgctgcctggtagcgaaagaatcgtttcacgtaaatggctgcccatactgttattcgcgagccacagatcttcagccggataaatatcggacatgccaggcacgataatacggcaagcataaacgcccagatgctcgtaatcggcaatataaacttctttatcttctttgttgaagatagccatcagtgtggcgaactcttcttccgtggtgccggagaaattccagtccacaaacggataatcggcatcctgcttgaacaggtcccaggagattaaaccgctggaatcgataaagtgcgtttcgaggttggtatgttcagcgacttcttcatcatcgaaggttggcggagtaaacacatccaaatctttcaggccacgaccttgcagcagctcggtcacggtacgttccagtgctacgccaaaatcaggatgcgcaccgaaagaggcaaagcaggtaccgttagcaggattgaacagtaccacgcaaatcaccggatactggccgccaagcgaaccgtcataagcgaagattgggaaaccctccgcttccagcgtttcgatggcttcaactactgctgggtaacgcgccagcacgtctgccgggatctctggcaggctgatgctttcagcaataatgcggtttttcacgtagcgttcgaaaacttcagacaatccctgaacgcgtgcttcgttgcgggtattacctgcggacataccgttggagacgtacaggttaccaatgatattcatcggaatataaacggtctgattgtcggactgacgcgtaaacggcaggccgcaaataccacgatcttcgttaccggattgtaggtcaatcagcatgctgccggtcagttcattctccggatcataaaacgcgcgcagacggtcatcgagcagcccttctggcacatcgtcattttcggtcagtgggaaccatttttcgttgggataatgcacgaacggaccgttggcgatggtttcgcccagccagaagtccgcaaaaaagtagttggttgagagacgctcgaaatattcaccgagtgcagaagccagcgccgctttcttggttgcgcctttaccgttggtaaaacacagtgcgcactctttgtcgcgaatatgtacagaccagacgttaggcacgggattcagccaggaggcctcttcaatctgaaagccgaggtctgaaagtttttgctggaagcgagcgatggaatcttccagagcggcatctttgccggggataaatgtttgcgtcatgaaaatcactttagtcgtacggaaagcgcgcaataatacgggttttatctcaaaggcgctatcaccgccgccatgccgatgaactgttgactatgcttttagcggataaaccacgttaagagcataaaaatgaaggcgttcgatctccaccgtatggcatttgataaagtgccttttgatttccttggcgaagttgcactacgtagtctttatacctttgtactggtctttttgttcctcaaaatgaccggaagacgcggtgtgcggcagatgtcgctgtttgaagttttaatcattctgacgctgggatcagcggcgggagatgtggcgttttatgatgatgtgccgatggtcccggtacttatcgtctttattactctggcgttgttataccgcctggtaatgtggttgatggcgcacagtgaaaaactggaagatcttctggaaggcaagccagttgtcattattgaagatggcgagctggcctggtcgaaactcaataactccaacatgacggaatttgagttctttatggagctacgattgcgtggcgtggagcagctggggcaggtacgtctggcgattctcgaaaccaacgggcaaatcagtgtctatttctttgaagatgacaaggtgaaaccgggtttacttattttacccagtgattgtacgcagcgttacaaagtggtgccggagtcggcggactatgcctgtattcgttgtagtgaaatcattcatatgaaagcgggggaaaaacaattatgtccgcgctgtgcaaatccagaatggacgaaggcaagtcgggcaaaacgggtgacctgacagtaaaaacatcggctttttgctaataatccgagagattcttttgtgtgatgcaagccacatttttgccctcaacggttttactcattgcgatgtgtgtcactgaatgataaaaccgatagccacaggaataatgtattacctgtggtcgcaatcgattgaccgcgggttaatagcaacgcaacgtggtgaggggaaatggctcaaatcttcaattttagttctggtccggcaatgctaccggcagaggtgcttaaacaggctcaacaggaactgcgcgactggaacggtcttggtacgtcggtgatggaagtgagtcaccgtggcaaagagttcattcaggttgcagaggaagccgagaaggattttcgcgatcttcttaatgtcccctccaactacaaggtattattctgccatggcggtggtcgcggtcagtttgctgcggtaccgctgaatattctcggtgataaaaccaccgcagattatgttgatgccggttactgggcggcaagtgccattaaagaagcgaaaaaatactgcacgcctaatgtctttgacgccaaagtgactgttgatggtctgcgcgcggttaagccaatgcgtgaatggcaactctctgataatgctgcttatatgcattattgcccgaatgaaaccatcgatggtatcgccatcgacgaaacgccagacttcggcgcagatgtggtggtcgccgctgacttctcttcaaccattctttcccgtccgattgacgtcagccgttatggtgtaatttacgctggcgcgcagaaaaatatcggcccggctggcctgacaatcgtcatcgttcgtgaagatttgctgggcaaagcgaatatcgcgtgtccgtcgattctggattattccatcctcaacgataacggctccatgtttaacacgccgccgacatttgcctggtatctatctggtctggtctttaaatggctgaaagcgaacggcggtgtagctgaaatggataaaatcaatcagcaaaaagcagaactgctatatggggtgattgataacagcgatttctaccgcaatgacgtggcgaaagctaaccgttcgcggatgaacgtgccgttccagttggcggacagtgcgcttgacaaattgttccttgaagagtcttttgctgctggccttcatgcactgaaaggtcaccgtgtggtcggcggaatgcgcgcttctatttataacgccatgccgctggaaggcgttaaagcgctgacagacttcatggttgagttcgaacgccgtcacggttaatgccgaaattttgcttaatccccacagccagcctgtggggtttttatttctgttgtagagagttgagttcatggaatccctgacgttacaacccatcgctcgtgtcgatggcactattaatctgcccggttccaagagcgtttctaaccgcgctttattgctggcggcattagcacacggcaaaacagtattaaccaatctgctggatagcgatgacgtgcgccatatgctgaatgcattaacagcgttaggggtaagctatacgctttcagccgatcgtacgcgttgcgaaattatcggtaacggcggtccattacacgcagaaggtgccctggagttgttcctcggtaacgccggaacggcaatgcgtccgctggcggcagctctttgtctgggtagcaatgatattgtgctgaccggtgagccgcgtatgaaagaacgcccgattggtcatctggtggatgcgctgcgcctgggcggggcgaagatcacttacctggaacaagaaaattatccgccgttgcgtttacagggcggctttactggcggcaacgttgacgttgatggctccgtttccagccaattcctcaccgcactgttaatgactgcgcctcttgcgccggaagatacggtgattcgtattaaaggcgatctggtttctaaaccttatatcgacatcacactcaatctgatgaagacgtttggtgttgaaattgaaaatcagcactatcaacaatttgtcgtaaaaggcgggcagtcttatcagtctccgggtacttatttggtcgaaggcgatgcatcttcggcttcttactttctggcagcagcagcaatcaaaggcggcactgtaaaagtgaccggtattggacgtaacagtatgcagggtgatattcgctttgctgatgtgctggaaaaaatgggcgcgaccatttgctggggcgatgattatatttcctgcacgcgtggtgaactgaacgctattgatatggatatgaaccatattcctgatgcggcgatgaccattgccacggcggcgttatttgcaaaaggcaccaccacgctgcgcaatatctataactggcgtgttaaagagaccgatcgcctgtttgcgatggcaacagaactgcgtaaagtcggcgcggaagtggaagaggggcacgattacattcgtatcactcctccggaaaaactgaactttgccgagatcgcgacatacaatgatcaccggatggcgatgtgtttctcgctggtggcgttgtcagatacaccagtgacgattcttgatcccaaatgcacggccaaaacatttccggattatttcgagcagctggcgcggattagccaggcagcctgaatgaacaacgggcaataaatagccaaatctttctttatcaaaacgtcggcacattgtcggcgttttttttcggaccttgtgagtcattttgattaatggtagcgtcgcttgtcaatgtaagttgttgatacataatatttatatatgattaatcaacggatgattcacatgaagaatactaaattactgctggcgattgcgacctctgcagcattactgacagggtgtcaaaatacccacggtattgataccaatatggctatcagctccggtttaaatgcctataaagcagcaacattaagcgatgccgatgcaaaagcgattgccaatcagggctgtgccgaaatggacagcggcaatcaagtcgcaagtaaatccagcaagtacggtaaacgtctggcaaaaatcgccaaagcattgggtaacaatattaatggcacgccggtcaactataaggtttatatgaccagcgacgtcaacgcatgggcgatggcgaacggctgtgttcgtgtctacagtggcctgatggacatgatgaatgacaacgaaattgaaggcgttctgggccatgaactgggccacgtcgcgttgggtcactcgctggctgaaatgaaagcttcttatgcgatcgttgccgcacgcgatgccatttcagctaccagcggtgtggcttcccagctttcccgctcacaattaggtgatatcgcagaaggcgctatcaatgctaaatactcccgtgataaagagtccgaagcagatgatttctcctttgatctgttgaagaaacgtggcatcagcacccaggggctggttggcagctttgaaacactggctagcctggatggcggtcgcacccagtccatgtttgactctcacccaccatcaacagagcgtgcgcaacacatccgtgatcgtatcgcctctggtaagtaaatcattgtcatctttcgggctggtcttctgccagcccgctataattgcgcaataaatccccatctgaatacagacaaaactggtttttgcacacaacgttaacgatttgtggcgtcggcgcgtataatgcgcgcggttatgttaacggtacgcctgttttaaggagataaagatgacggcaattgccccggttattaccattgatggcccaagcggtgcagggaaaggcaccttgtgtaaggctatggcggaagcgttgcaatggcatctgctggactcgggtgcaatttatcgcgtactggcattggcggcattacatcaccatgttgatgttgcgtcggaagatgcgctggtaccgctggcatcccatctggatgtacgttttgtgtcgaccaatggcaatctggaagtgatcctcgaaggggaagatgtcagcggcgaaattcgtactcaggaagtggcgaatgcagcttcacaagtcgcggcattcccacgcgttcgtgaagcattattgcgtcgccaacgcgcgtttcgcgaattaccaggtctgattgccgatggccgcgacatgggaacggtggtattccctgatgcaccagtgaaaattttccttgacgcctcctcggaagaacgtgcgcatcgccgcatgctacagttgcaggagaagggctttagtgttaactttgagcgccttttggccgagatcaaagaacgcgacgaccgcgatcgtaaccgagcggtagcgccactggttccggcagccgatgctttagtgttggattccaccaccttaagcattgagcaagtgattgaaaaagcgctacaatacgcgcgccagaaattggctctcgcataagcgaccgaatttgcagtacccccgttgcaatggaatgacagcgggtatgttaaacaaccccatccggcatggagccaggtggacgttaaatataaacctgaagattaaacatgactgaatcttttgctcaactctttgaagagtccttaaaagaaatcgaaacccgcccgggttctatcgttcgtggcgttgttgttgctatcgacaaagacgtagtactggttgacgctggtctgaaatctgagtccgccatcccggctgagcagttcaaaaacgcccagggcgagctggaaatccaggtaggtgacgaagttgacgttgctctggacgcagtagaagacggcttcggtgaaactctgctgtcccgtgagaaagctaaacgtcacgaagcctggatcacgctggaaaaagcttacgaagatgctgaaactgttaccggtgttatcaacggcaaagttaagggcggcttcactgttgagctgaacggtattcgtgcgttcctgccaggttctctggtagacgttcgtccggtgcgtgacactctgcacctggaaggcaaagagcttgaatttaaagtaatcaagctggatcagaagcgcaacaacgttgttgtttctcgtcgtgccgttatcgaatccgaaaacagcgcagagcgcgatcagctgctggaaaacctgcaggaaggcatggaagttaaaggtatcgttaagaacctcactgactacggtgcattcgttgatctgggcggcgttgacggcctgctgcacatcactgacatggcctggaaacgcgttaagcatccgagcgaaatcgtcaacgtgggcgacgaaatcactgttaaagtgctgaagttcgaccgcgaacgtacccgtgtatccctgggcctgaaacagctgggcgaagatccgtgggtagctatcgctaaacgttatccggaaggtaccaaactgactggtcgcgtgaccaacctgaccgactacggctgcttcgttgaaatcgaagaaggcgttgaaggcctggtacacgtttccgaaatggactggaccaacaaaaacatccacccgtccaaagttgttaacgttggcgatgtagtggaagttatggttctggatatcgacgaagaacgtcgtcgtatctccctgggtctgaaacagtgcaaagctaacccgtggcagcagttcgcggaaacccacaacaagggcgaccgtgttgaaggtaaaatcaagtctatcactgacttcggtatcttcatcggcttggacggcggcatcgacggcctggttcacctgtctgacatctcctggaacgttgcaggcgaagaagcagttcgtgaatacaaaaaaggcgacgaaatcgctgcagttgttctgcaggttgacgcagaacgtgaacgtatctccctgggcgttaaacagctcgcagaagatccgttcaacaactgggttgctctgaacaagaaaggcgctatcgtaaccggtaaagtaactgcagttgacgctaaaggcgcaaccgtagaactggctgacggcgttgaaggttacctgcgtgcttctgaagcatcccgtgaccgcgttgaagacgctaccctggttctgagcgttggcgacgaagttgaagctaaattcaccggcgttgatcgtaaaaaccgcgcaatcagcctgtctgttcgtgcgaaagacgaagctgacgagaaagatgcaatcgcaactgttaacaaacaggaagatgcaaacttctccaacaacgcaatggctgaagctttcaaagcagctaaaggcgagtaattctctgactcttcgggatttttattccgaagtttgttgagtttacttgacagattgcaggtttcgtcctgtaatcaagcactaagggcggctacggccgcccttaatcaatgcagcaacagcagccgcttaatttgcctttaaggaaccggaggaatcatgaccaagtcagaattgatagaaagacttgccacccagcaatcgcacattcccgccaagacggttgaagatgcagtaaaagagatgctggagcatatggcctcgactcttgcgcagggcgagcgtattgaaatccgcggtttcggcagtttctctttgcactaccgcgcaccacgtaccggacgtaatccgaagactggcgataaagtagaactggaaggaaaatacgttcctcactttaaacctggtaaagaactgcgcgatcgcgccaatatttacggttaagttttttactcaaacttgaacgagagaaaagcacctgtcgggtgcttttttcatttctctaatctggaactggaagctgcctcgcagagttttgaacagttttcaccctttcgttaaattcttctgaatatgcctcggggaacgcaaaattcccaccagacaaccgctcaacaaagttgcacactttccataaacagggaggggtgcatgaaaataacgacagtcggtgtatgcataattagcggaatttttccgttgctgattttgccccaattgcctgggacattaacccttgcgtttctgactctcttcgcctgcgtactggcatttatccctgttaaaaccgtccgttatatcgcgctgacgttgctgtttttcgtttggggcatattatcagcaaagcaaattttgtgggcaggagaaaccttaactggcgcgacgcaggatgcaattgttgagatcactgcaactgacggcatgaccactcattacggtcaaattactcatctacaaggtcgacgtatattccctgcgtcaggtctcgtgatgtatggcgaatatcttccgcaagcggtttgtgctggacaacaatggtcaatgaaactcaaagttcgtgcagttcatggccaacttaatgatggcggctttgatagccagcgttatgccattgcccagcatcagccgctcaccggccgttttctgcaggcaagtgtcattgaaccgaattgtagcctgcgtgcacagtatctggcgtcactacaaacaacgctgcaaccctatccgtggaatgcggttattcttggtttaggtatgggggaacggttatccgtccccaaagaaatcaaaaatatcatgcgcgatactggaacggcgcatttaatggcgatatcgggattgcacatcgcttttgcggcgttgctggctgccggactcattcgcagtggacaaatttttctgcctgggcgctggatccactggcaaataccattaattggcggaatctgctgtgctgctttttatgcctggttgacgggaatgcaacctcctgcattgcgtaccatggtggcgcttgctacgtggggaatgcttaagttaagtgggcgacagtggagtggctgggatgtatggatatgttgtctggcggcaattttgctgatggatcctgttgccattctctcgcaaagtttatggctctctgccgctgcggtcgcggcattgatattttggtatcagtggtttccctgtcctgagtggcaactgccgccggtattgcgtgcagttgtttccctcatccatctgcaactgggaatcacacttctgcttatgcccgtgcaaatcgtcatatttcatggcattagtctgacctcgtttattgcaaatctattagcaattcccttggtgacatttatcacggttccgttgatcctcgccgcgatggttgtgcatttaagcgggccgttaatcctggagcaagggttatggtttcttgccgaccggtctttggctttacttttctgggggttaaagagtttgccggaagggtggatcaacattgctgaatgttggcaatggctatcattttccccatggttcttactggtggtatggcgattaaacgcctggcgaacgttgccagcaatgtgtgtggctggaggcttgctgatgtgctggccgctgtggcaaaaacctcgacctgacgagtggcagctgtacatgcttgatgtcgggcaagggctggcaatggtgatagccagaaacggcaaagcgattctctatgacacaggactggcctggcctgaaggggatagtgggcaacaactgattatcccctggctccactggcataatcttgaaccggaaggcgttattctgagccatgaacatctggatcaccggggagggctggattcaatattgcatatatggccgatgttatggatcagaagtccgttaaactgggaacatcatcagccctgtgtgcgtggcgaagcgtggcaatggcaaggattgcgtttcagcgcgcactggcctttacaaggtagcaacgataaaggaaataaccattcctgtgtggttaaggttgatgacgggacgaatagcattcttctaaccggtgatattgaagccccagctgaacaaaagatgctaagccgttactggcagcaagtgcaggcaacattgcttcaggtacctcaccatggcagtaatacctcatcatcgttgccattaattcagcgagtgaatggaaaagtggcactcgcatcggcatcgcgctataacgcatggcgactgccctctaacaaagttaagcatcgctatcaactgcaaggatatcaatggattgatactccacatcaaggtcaaacaacggtcaatttttcagcgcaaggctggcggattagcagcctcagggagcaaattttacctcgttggtatcatcagtggtttggcgtgccagtggataacgggtagaatatgcggctatttcaacaaatgctggttttttgaatgcataacgacaaagatctctctacgtggcagacattccgccgactgtggccaaccattgcgcctttcaaagcgggtctgatcgtggcgggcgtagcgttaatcctcaacgcagccagcgataccttcatgttatcgctccttaagccacttcttgatgatggctttggtaaaacagatcgctccgtgctggtgtggatgccgctggtggtgatcgggctgatgattttacgtggtatcaccagctatgtctccagctactgtatctcctgggtatcaggaaaggtggtaatgaccatgcgtcgccgcctgtttggtcacatgatgggaatgccagtttcattctttgacaaacagtcaacgggtacgctgttgtcacgtattacctacgattccgaacaggttgcttcttcttcttccggcgcactgattactgttgtgcgtgaaggtgcgtcgatcatcggcctgttcatcatgatgttctattacagttggcaactgtcgatcattttgattgtgctggcaccgattgtttcgattgcgattcgcgttgtatcgaagcgttttcgcaacatcagtaaaaacatgcagaacaccatggggcaggtgaccaccagcgcagaacaaatgctgaagggccacaaagaagtattgattttcggtggtcaggaagtggaaacgaaacgctttgataaagtcagcaaccgaatgcgtcttcaggggatgaaaatggtttcagcctcttccatctctgatccgatcattcagctgatcgcctctttggcgctggcgtttgttctgtatgcggcgagcttcccaagtgtcatggatagcctgactgccggtacgattaccgttgttttctcttcaatgattgcactgatgcgtccgctgaaatcgctgaccaacgttaacgcccagttccagcgcggtatggcggcttgtcagacgctgtttaccattctggacagtgagcaggagaaagatgaaggtaagcgcgtgatcgagcgtgcgactggcgacgtggaattccgcaatgtcacctttacttatccgggacgtgacgtacctgcattgcgtaacatcaacctgaaaattccggcagggaagacggttgctctggttggacgctctggttcgggtaaatcaaccatcgccagcctgatcacgcgtttttacgatattgatgaaggcgaaatcctgatggatggtcacgatctgcgcgagtataccctggcgtcgttacgtaaccaggttgctctggtgtcgcagaatgtccatctgtttaacgatacggttgctaacaacattgcttacgcacggactgaacagtacagccgtgagcaaattgaagaagcggcgcgtatggcctacgccatggacttcatcaataagatggataacggtctcgatacagtgattggtgaaaacggcgtgctgctctctggcggtcagcgtcagcgtattgctatcgctcgagccttgttgcgtgatagcccgattctgattctggacgaagctacctcggctctggataccgaatccgaacgtgcgattcaggcggcactggatgagttgcagaaaaaccgtacctctctggtgattgcccaccgcttgtctaccattgaaaaggcagacgaaatcgtggtcgtcgaggatggtgtcattgtggaacgcggtacgcataacgatttgcttgagcaccgcggcgtttacgcgcaacttcacaaaatgcagtttggccaatgatcgaaaaaatctggtctggtgaatcccctttgtggcggctattgctgccactctcctggttgtatggcctggtgagtggcgcgatccgtctttgctataaactaaaactgaagcgcgcctggcgtgcccccgtaccggttgtcgtggttggtaatctcaccgcaggcggcaacggaaaaaccccggtcgttgtctggctggtggaacagttgcaacagcgcggtattcgcgtgggggtcgtatcgcggggatatggtggtaaggctgaatcttatccgctgttattgtcggcagataccacaacagcacaggcgggtgatgaacctgtgttgatttatcaacgcactgatgcgcctgttgcggtttctcccgttcgttctgatgcggtaaaagccattctggcgcaacaccctgatgtgcagatcatcgtaaccgacgacggtttacagcattaccgtctggcgcgtgatgtggaaattgtcgttattgatggtgtgcgtcgctttggcaatggctggtggttgccggcggggccaatgcgtgagcgagcggggcgcttaaagtcggttgatgcggtaatcgtcaacggcggtgtccctcgcagcggtgaaatccccatgcatctgctgccgggtcaggcggtgaatttacgtaccggtacgcgttgtgacgttgctcagcttgaacatgtagtggcgatggcggggattgggcatccgccgcgcttttttgccacgctgaagatgtgtggcgtacaaccggaaaaatgtgtaccgctggccgatcatcagtctttgaaccatgcggatgtcagtgcgttggtaagcgccgggcaaacgctggtaatgactgaaaaagatgcggtgaaatgccgggcctttgcagaagaaaattggtggtatttgcctgtagacgcacagctttcaggtgatgaaccagcgaaactgcttacgcaactaaccttgctggcttctggcaactagttacgccgcggcagcgttcgattgatggagtcatgaatgtcgctgccgcacctctcccttgctgatgcgcgtaatcttcaccttgccgcacaaggcctgttaaacaaaccccgccgtcgagcgtcgttggaggatattccggcaacgatctcccgcatgtccttgctgcaaatcgataccatcaatattgttgcccgtagtccatatctggtgcttttcagtcgtctgggaaattatcctgcccagtggctggatgagtctctggcgcgtggcgaattaatggaatactgggcgcatgaagcctgctttatgccgcgtagcgactttcgtcttattcgccaccgcatgctggcacctgaaaaaatgggctggaaatacaaagacgcctggatgcaggaacatgaggcggaaattgcacagttaattcagcatattcatgataaggggccggtacgttcagccgattttgagcatcctcgtaaaggtgcaagcggctggtgggaatggaagccgcataaacggcatctggaaggtttatttactgccggaaaggtgatggtgattgaacggcgcaacttccagcgcgtttatgatttaacccaccgtgtcatgcctgactgggatgatgagcgcgatctcgtttcgcaaacagaagcagaaatcatcatgctggataacagtgcgcgtagcctgggaatattccgcgaacagtggctggcagattactatcggctgaaacgtccggcactggcggcgtggcgcgaagcgagggctgaacagcagcaaatcattgctgtgcatgttgaaaaattgggcaatctttggctgcatgatgatttgctgccgctactcgagcgagcgctggccggaaagctcactgcaacgcacagcgcggtactttcgccttttgatcctgttgtctgggatcgcaaacgcgcagagcagctttttgattttagctaccggctggagtgctataccccagcgccgaaacgccagtatggctattttgttctgccgttattacatcgtgggcaattagttgggcgaatggatgccaaaatgcatcgccagacaggcatccttgaagttatctctctgtggttacaggaaggtattaaaccaacgacaacgctgcaaaaagggctacgtcaggcgattactgatttcgctaactggcagcaggcaacgcgggtgacattaggatgctgcccgcaaggcctctttactgattgccgcaccggctgggaaatagaccccgtcgcataaatgattatgataagatttatgcattcataacccgatccatctggaggaactatggatcatcgtctgcttgaaatcattgcctgcccggtttgcaacggaaaactttggtataaccaggaaaaacaagagcttatttgcaaactggacaacctcgctttcccgctgcgtgatggcattccagtgttgctggaaacggaagcccgcgtgctgactgctgatgagagtaaatcatgagttttgtggtcattattcccgcgcgctacgcgtccacgcgtctgcccggtaaaccattggttgatattaacggcaaacccatgattgttcatgttcttgaacgcgcgcgtgaatcaggtgccgagcgcatcatcgtggcaaccgatcatgaggatgttgcccgcgccgttgaagccgctggcggtgaagtatgtatgacgcgcgccgatcatcagtcaggaacagaacgtctggcggaagttgtcgaaaaatgcgcattcagcgacgacacggtgatcgttaatgtgcagggtgatgaaccgatgatccctgcgacaatcattcgtcaggttgctgataacctcgctcagcgtcaggtgggtatggcgactctggcggtgccaatccacaatgcggaagaagcgtttaacccgaatgcggtgaaagtggttctcgacgctgaagggtatgcactgtacttctctcgcgccaccattccttgggatcgtgatcgttttgcagaaggccttgaaaccgttggcgataacttcctgcgtcatcttggtatttatggctaccgtgcaggctttatccgtcgttacgtcaactggcagccaagtccgttagaacacatcgaaatgttagagcagcttcgtgttctgtggtacggcgaaaaaatccatgttgctgttgctcaggaagttcctggcacaggtgtggatacccctgaagatcttgagcgcgttcgcgctgaaatgcgctaatttcacttcacgacacttcagccaattttgggaggagtgtcgtaccgttacgattttcctcaatttttcttttcaacaattgatctcattcaggtgacatcttttatattggcgctcattatgaaagcagtagcttttatgagggtaatctgaatggaacagctgcgtgccgaattaagccatttactgggcgaaaaactcagtcgtattgagtgcgtcaatgaaaaagcggatacggcgttgtgggctttgtatgacagccagggaaacccaatgccgttaatggcaagaagctttagtacgcccggaaaagcccgacaactggcatggaaaaccaccatgctggcaagaagtgggactgtccgtatgccgactatttatggtgtgatgacgcatgaagaacaccccggccccgatgtcctgctactggagcggatgcgtggtgtttcggtggaggcaccagcccgaacaccagaacgctgggaacaactcaaagaccaaatcgttgaagccttactggcctggcaccgtcaggacagtcgcggttgcgtcggcgcggtcgacaatactcaggaaaatttctggccctcatggtaccggcaacatgttgaagtgctatggaccacgctcaatcagttcaataacaccggtctgacgatgcaggataagcggatcctgtttcgcactcgcgaatgtctcccggcattatttgaaggctttaacgacaattgtgtgctgattcacggtaacttctgtttacgcagcatgttgaaagattcgcgcagcgatcagttactggcgatggtcgggccgggactaatgctttgggcaccgcgagaatacgaactgttccgactaatggataattctctggcggaagatttgctctggagttacctgcaacgcgcgccagtggcggagtcgttcatctggcggcgttggttgtatgtgttatgggatgaagttgcgcaactggttaataccggacgatttagtcggcgcaacttcgatctggcatcaaaatcactcttgccgtggctcgcctgacgaaccttttagccactgccagatacggccaagcgtttcatagccaacacgatcgctatgcatcaaccagaccggagaagggattgcccgttcccacgggttaagcggcgagtcgatggccaactgattcgccggggctggtagcggatttaacccttcctgctgaaaaaagatcatcgcccgcggcagatgtgatgcggaggtcaccagcaggaaaggggcgtcaccaatcgcctgtttcactgctgcagcttcttcttcggtatcttttggcaaatccagggtgataatttgctcgcgcggcacgcccagcgattgcgcaactctggcacctacttccgctgtactcaccgtattggtttttgctacgcctcccgtgaagatcagttttgatcccggattttcgcgccataagcgaataccttcattcaggcgtggcagactgttattgattaaattagagctcggtgcccactgcgggttccaggtataaccacctccgagcaccacgatatagtccactttttgcgaattattccatgtcggataggtgctttcgatgggacgcagcaggcggtcggctaccggttgcaaactcaataacaagagcgccagccacccaatgctaataaaaatcttcccggttttttgaaaacggctaaaccacagcagcgccaggccagcgccaataatcaacaacatcagcggaagtggcagcaacatattgccaatcacttttttcagtgtaaaaagcatcctttctggttccttttttaaccatatagcaagggatcgccagcgatattacaccagacgggttcattctcgccgtggctgtgacaaaatagcgtctttatcagaaaacgtcttagccaaccggtggagaaagcaatgcaggatcgcaattttgatgatattgcggaaaagttttcccgtaacatttacggcaccaccaaagggcagcttcgacaggctattctgtggcaggatctcgatcgcgtgctggcggaaatgggcccgcaaaaactgcgtgtgctggatgctggcggtggagaagggcagaccgcaatcaaaatggccgagcgtgggcatcaggtcattttatgcgatctttctgcgcagatgatcgaccgcgcaaaacaggcggcagaagcaaaaggtgtgagcgacaacatgcaatttatacattgcgccgctcaggatgttgcttcgcatttggaaacgcccgttgatctgatattgttccatgcggtgctcgagtgggtggctgatccccgcagcgtattgcagaccctctggtcagtgttgcgtccaggcggcgtgttgtcgttaatgttctacaatgcgcatggtttgttgatgcataacatggtcgccgggaattttgattacgtgcaggcgggaatgccgaaaaagaaaaaacggacgctttcgccagattatccacgcgacccggcgcaggtttatctgtggctggaagaagctggttggcaaattatgggtaagacaggcgttcgcgtgtttcatgattatctgcgcgagaaacaccagcagcgcgactgctatgaagcattacttgaattagaaacgcgttattgccgtcaggaaccgtatattaccctggggcgttatattcatgtcaccgcgcgcaaaccgcagagcaaggataaagtatgagtgaattttcccagacagtccccgaactggttgcctgggccagaaaaaatgacttctccatctcgctgccggtagaccgactctcttttctgctggcggttgccacgctgaacggcgagcgtctggatggtgagatgagtgaaggcgagctggtggatgcattccgccatgtgagtgatgcgtttgagcaaaccagcgaaaccatcggcgtgcgcgccaataacgcgatcaacgacatggtgcgtcaacgtctgctgaaccgctttaccagcgagcaggcggaagggaacgcaatttaccgtctgacgccgctcggcatcggcattactgactactacatccgtcagcgcgagttttctacgctgcgtctttctatgcagttgtcgattgtggcgggtgagctcaaacgcgcagcagatgccgccgaagagggcggtgatgaatttcactggcaccgtaatgtctatgcgccactgaaatattcggtagcagaaattttcgacagtatcgacctgacgcaacgtctgatggacgaacagcagcagcaggtgaaggacgatatcgcccagttgctgaacaaagactggcgggcggcgatttccagctgtgaattgttgctttcggaaacttccggaacgctgcgtgaattgcaggatacgctggaagcggcaggcgacaaattgcaggctaatctgttgcgcattcaggatgcgacgatgacccatgacgatctgcatttcgtcgatcgtctggtgttcgatctgcagagcaaactcgatcgtattatcagttggggccagcaatccatcgacttgtggattggctacgaccgccacgtacacaaatttattcgtaccgcgatcgatatggataaaaaccgcgtctttgctcagcggttacgtcagtcggtacaaacctattttgatgagccgtgggcgctaacttatgccaatgccgatcgtctgctggatatgcgtgacgaagagatggcactgcgcgatgaagaagtgactggggaacttcctgaggatctggaatacgaagagtttaacgagatccgcgaacagctggcggcgatcatcgaagaacaacttgccgtgtacaaaaccagacaagtgccgctggatcttggtctggtggtacgcgaatatctgtcacagtatccgcgtgcacgtcactttgacgttgcgcgtattgttattgatcaggcggtacgtcttggcgtagcgcaagcagatttcaccggactgccagcgaaatggcagccgattaatgattacggagccaaggtacaggcgcatgtcatcgacaaatattgaacaagtgatgccggttaagctggcgcaggcgctggcgaatccgttatttccggcgctggacagcgccttacgttcaggacgccatattggcctcgacgaactggataatcatgcattcctgatggattttcaggaatatctggaagagttttacgcgcgttataacgttgagcttattcgcgcaccagaagggttcttctatttacgcccacgttccaccacgctgatccctcgttccgtcttgtcggaactggatatgatggtcgggaaaatcctctgttatctctatctcagcccggaacggctggcgaatgaggggattttcacccagcaggaactgtacgacgaactgctcaccctggccgatgaagcaaaactgctgaaactggtgaacaaccgttcaaccggttcagacgttgaccgtcagaagttgcaggagaaagtacgttcttcgctcaaccgtctgcgtcgtttaggcatggtgtggtttatgggccacgacagcagcaagtttcgcattaccgaatcggtgttccgcttcggagccgatgtgcgtgctggcgacgatccccgtgaagcacagcgtcgcctgattcgtgatggcgaagcaatgccgattgaaaatcatctgcaactcaacgatgaaaccgaagagaatcagccagatagcggagaggaagaataatgattgaacgcggtaaatttcgctcactgacgctgattaactggaacggcttttttgcccgaacttttgaccttgacgagctggtcacgacgctttctggcggtaacggggcgggtaaatccaccaccatggcggcgttcgttacggcgctgatccccgacctgaccctgctgcatttccgtaacactacggaagccggggccaccagcggttcgcgcgataaaggtctgcacggtaagctgaaagcgggtgtctgttattcgatgctcgacaccattaactcgcgccaccagcgcgtggtggtcggtgtgcgtctgcaacaggttgccggacgcgatcgtaaagtggatatcaagccgtttgccattcagggactgccgatgtcggtgcagccgacacagctggtgaccgaaaccctgaacgaacgccaggcgcgcgtgctgccgcttaacgagctgaaagacaagctcgaggcgatggaaggcgtgcagtttaaacagttcaactccattactgattaccactcgctgatgttcgatctgggcatcatcgcgcgtcgtctgcgctccgcatctgaccgtagcaaattctatcgtctgatcgaagcttcgctgtatggcgggatctccagtgccattacccgttctctgcgcgactacctgttgccagaaaacagcggcgtgcgtaaagcgttccaggacatggaagcggcgctgcgtgaaaaccgtatgacgctggaagcgattcgtgtcacccagtcggaccgcgacctgtttaagcatctgatcagcgaagccaccaactacgtggcggcggactacatgcgtcacgccaacgagcgccgtgtccatctcgacaaagccctggagtttcgtcgcgagctacatacttcgcgtcagcaactggcggctgagcagtacaaacacgtcgatatggcgcgtgagctggcagagcacaacggtgccgaaggcgatctggaagcggattatcaggcggccagtgatcacctgaacctggtgcaaaccgcactgcgtcagcaggagaagatcgaacgctacgaagcggatctcgatgagctgcagatccgtctggaagagcaaaatgaagtggtggcagaagccatcgaacgccagcaagagaatgaggctcgtgcggaagctgccgaactggaagtggacgagctgaaaagccagcttgctgactaccagcaggcgctggacgtccagcaaacgcgcgcgatccagtataaccaggcgattgctgcgcttaatcgtgccaaagaactgtgccatctgccggacttaaccgccgactgcgccgccgaatggctggaaaccttccaggcgaaagagctggaagcgactgaaaaaatgctctctcttgagcagaaaatgagcatggcgcaaaccgcgcacagccagtttgagcaggcttatcagctggtggtggcaatcaacggcccactggcgcgtaacgaggcgtgggatgtcgctcgcgaactattgcgcgaaggggtcgatcagcgtcacctggcagagcaggttcagccgctgcggatgcgattaagcgaactggaacagcgtctacgcgagcagcaagaagctgagcgtctgctggcagatttctgcaaacgtcagggcaagaattttgatatcgacgaactggaagccctgcatcaggaactggaagcacgcattgcctctctttccgatagcgtgtctaacgcccgtgaagagcgcatggcactgcgccaggagcaggaacagctgcagtctcgcattcagagtttgatgcagcgtgcgccggtttggctggcagcgcaaaacagtctcaaccagttgagcgaacagtgcggcgaagagtttacctccagccaggacgtcaccgaatatctgcaacagttgctggagcgtgagcgagaggcgattgttgaacgcgatgaagtgggcgcgcgcaaaaacgccgtcgatgaagagatcgaacgtttaagccagcctggcggctctgaagatcagcgtctgaacgcgctggcggagcgttttggtggtgtgctgctgtcagaaatttatgacgacgttagcctggaagatgcgccgtacttctcagcgctgtatggcccgtcacgccacgccatcgtggtgccagatctgtcacaggtaactgaacacctggaaggcttgaccgattgcccggaagatctctatctgatcgaaggagatccgcagtcattcgatgacagcgtgttcagcgttgatgagctggaaaaagcggtagtggtgaaaatcgccgatcgtcagtggcgttattcacgtttcccggaagtgccgctgtttggtcgtgctgcgcgtgaaagccgtattgaaagcctccatgccgagcgtgaagtgctttccgaacgcttcgccacgctctcctttgatgtacagaaaactcagcgtctgcatcaggcgttcagccgctttatcggcagtcatctggcggttgcgtttgagtctgacccggaagcagaaatccgtcaactgaacagccgtcgcgtcgaactggagcgggcgttaagtaatcatgaaaatgataaccagcagcagcgtattcagtttgagcaggcgaaagagggcgttacggcgctgaaccgcattctgccgcgtctcaacctgttggctgatgacagcctggcggatcgcgtcgatgaaatccgcgaacgtctggatgaagcccaggaagccgcgcgttttgttcagcagtttggcaatcaactggcgaaactggaaccgattgtttcggtattgcagagcgacccggaacagttcgaacagttaaaagaagattacgcgtactctcagcagatgcagcgcgatgcccgtcagcaggcgtttgccctgacggaagtggtgcagcgtcgtgcgcactttagctattctgactcggcagaaatgcttagcggtaacagcgatctcaacgaaaaactgcgtgaacgtctggaacaggcggaagcggagcgtacccgcgctcgcgaagcgttgcgcggtcacgcagcgcagttgagtcagtacaaccaggtgctggcttcgctgaaaagttcttacgacaccaaaaaagagctactcaacgatctgcaacgtgaattgcaggatatcggcgtgcgtgctgatagcggggcagaagagcgggcgcgtattcgccgtgacgagctgcatgcgcaactgagcaataaccgttcacgccgcaatcaactggaaaaagcgcttaccttctgcgaagcggagatggacaacctgacccgcaaactgcgcaagctggagcgggattactttgagatgcgcgagcaggtagtgaccgccaaagcgggctggtgtgcggtgatgcgcatggtgaaagataacggcgttgagcgccgcttacaccgtcgtgagctggcttatctctccgctgatgatttgcgttccatgtcggataaggcgttaggtgcgctgcgtctggcggtggcggataacgaacatctgcgcgacgtgctgcgcatgtcggaagatccgaaacgtccggagcgtaaaattcagttcttcgtggcggtttatcagcatctgcgtgaacgtattcgtcaggatattattcgtaccgatgatccggtggaagctatcgaacagatggagattgaacttagccgtctgaccgaagaattaacctcccgtgaacagaaactggcgatcagttcccgcagcgtggcgaacatcattcgcaaaaccattcagcgcgagcagaaccgtatccgtatgctcaaccaggggttgcagaacgtatcgtttggtcaggtgaacagcgtgcgtctcaacgtgaacgtgcgtgaaacgcacgccatgctactggatgtgctctctgaacagcacgagcagcatcaggatctgtttaacagcaaccgtttgaccttctcggaagcgctggcgaaactgtatcaacgtcttaacccgcagattgatatggggcagcgcacgccgcagaccatcggtgaagaactgctggattaccgcaactatctggaaatggaagttgaggttaaccgtggttccgatggctggctgcgcgcagagtctggtgcattgtcgaccggtgaggcgattggtaccggtatgtcgattctggtgatggtggtacaaagctgggaagatgaatctcgccgcctgcgcggtaaagatatctctccttgccgcctgctgttcctcgatgaagcagcgcgactggatgctcgttctatcgccacgctgtttgaattgtgtgagcgtttgcaaatgcaactcatcatcgcagcgccggaaaatatcagcccggagaaaggcaccacctataaactggtgcgtaaagtcttccagaataccgaacacgttcatgtcgtcggcctgcgaggatttgcgccgcaactccctgaaacgcttccaggaactgacgaagcgccttctcaggcgagttaaaattaaggcggcagcaatgccgccttttctttttccgaaaactccgtttctgcactaaaaaagtggcacattacggcgcgcttttctttaaacttctttacattaggttatgtaaaaacgtatcggcgtttatatactgaagataagcctgatgagtaacaggcttgctcgtcatactttcgtgagtattggcgttgtacaggcaagtcgtaaaataacagcctggctattcagagtatgataaaaacagggggcaagggatgttgcttaatatgatgtgtggtcgtcagctgtcggcaatcagtttgtgcctggccgtaacattcgctccactgttcaatgcgcaggccgatgagcctgaagtaatccctggcgacagcccggtggctgtcagtgaacagggcgaggcactgccgcaggcgcaagccacggcaataatggcggggatccagccattgcctgaaggtgcggcagaaaaagcccgcacgcaaatcgaatctcaattacccgcaggttacaagccggtttatcttaaccagcttcaactgttgtatgccgcacgcgatatgcaacccatgtgggaaaaccgtgatgctgttaaagccttccagcaacagctggcagaggtggcgattgccggtttccagccgcagtttaataaatgggtagagttactgaccgatcctggtgttaacgggatggcacgcgacgtggtgctctctgatgcgatgatgggctatctccatttcattgcaaatattccggtcaaaggcactcgctggctatatagcagtaaaccttatgcacttgcaacgccgccgctctcggtgattaaccaatggcagctggcgctggataaaggtcaattgcctacgtttgttgcaggactggcaccgcagcatccgcaatatgcggcgatgcatgaatcgttactggccttactctgtgacaccaaaccgtggccccaactgaccggcaaagcaacgttgcgcccagggcagtggagtaacgacgtaccggcgttgcgcgaaatattgcaacgcacaggcatgttggacggggggccgaaaattactctacctggcgatgacacgccaactgacgcggtagtcagcccatccgctgttactgttgaaacagcagaaactaagccgatggataagcaaacgacgtctcgtagtaaacctgcgcctgccgttcgcgccgcctacgataatgaactggtggaagccgttaaacgttttcaggcatggcaaggattgggggcagatggtgctattggcccggcaacacgtgactggttaaacgtaacgcccgcccagcgtgctggtgtgttggctctcaacatccagcgattgcgcttgctgccaacagagctttctaccgggatcatggttaacattccggcctattcgctggtctactatcagaacggcaatcaggtgctggattcgcgagtcattgtcggtcgccccgatcgcaaaacgccgatgatgagcagtgcccttaacaacgtagtggtaaacccgccgtggaacgtacctccaactctggcacgcaaagatattctgccaaaagtgcgcaacgatccgggatatctcgaaagccatggctatacggtgatgcgcggctggaacagcagagaagcgattgacccatggcaggttgactggtctacaatcacggcctcgaatttaccgttccgcttccagcaggctccaggcccacggaactcgctggggcgctataaattcaatatgccgagttcagaggccatttatttgcatgacacgccgaaccacaatctgttcaagcgtgatacacgcgcattgagctcaggctgtgtacgagtgaataaagcttccgatctggcgaatatgctgttgcaggatgcaggctggaatgacaaacgtatttctgatgcgctgaagcagggtgatacacgttacgtcaatattcggcagtcgattccggtgaatctctactacctgacggcctttgttggtgcagatggtcgtacccagtatcgtacagatatttacaattatgatctgcctgcgcgatccagctcgcaaatcgtatcgaaagcggaacaattaatcaggtaaatgaagtagttcggggaaatcagttgtcgtaataattagcatgattgggggcgattctctgcagcccccgtcactgctggggttgagtcatcttgacgtctgctttacgggcggttaaggtgcctcttgtgcgccagaagtgcatataaacgataacattgacctgtagacttgattatcatggacaaattcgacgctaatcgccgcaaattgctggcgcttggtggcgttgcactcggtgccgccatcctgccgacccctgcgtttgcaacactctctaccccacgcccgcgcattttgacactcaataatcttcataccggagagtcaatcaaagcggagtttttcgatggcagaggctatattcaggaagaattggcaaaacttaaccattttttccgcgattaccgcgcgaacaaaataaagtccatcgacccaggattattcgaccagttgtatcgcctgcaagggttgttaggcacgcgcaaaccggtgcaactcatttccggttatcgttctattgataccaacaatgaactacgcgcccgcagccgtggagtagcgaagaaaagctatcacactaaaggccaggcgatggatttccatattgaaggtatcgcgttaagcaatattcgcaaagccgcgttatctatgcgcgcaggtggtgtaggatattatccacgtagtaactttgtgcatattgataccgggccagcacggcactggtagtaattgcttaacgaaacaggggcagtatgaactatcgtattattccggtcaccgcattctcccagaactgttcattaatctggtgtgaacaaacccgtctggccgcactggtcgatcctggcggcgatgcggaaaaaatcaaacaggaagttgatgacagcggcctgacactgatgcagatcctgctgacgcatggtcatctggaccacgttggcgcagcggcggaactggcgcaacattacggcgtgccggttttcggcccggaaaaagaagatgagttctggctgcaaggcttgcctgcgcaaagtcgtatgtttggtctggaagagtgccagccgctgacgccagatcgttggctgaacgaaggcgataccatcagcatagggaatgtgactttacaggtgttacattgccctgggcatacgccgggtcatgtcgtgttttttgatgatcgggcaaagctgctgatttctggcgatgttattttcaaaggcggagtagggcgcagtgacttcccgcgtggcgatcataatcaactgatttcttcaatcaaagataaattgctgccactgggggatgacgtgatatttattccgggtcacggaccattatccacacttggttatgaacgcctgcataatcccttcctgcaagacgaaatgcccgtctggtaaggcacataaaaaagcccgcttttaatgctggcctggatttctggcaaagtgcgctttgtttatgccggatgcggcacgagcgccttatccggcctacaaaatcgtgcaaattcaaaatattgcaggggacgcgtaggcctgataagcgtagcgcatcaggcaatgttgcgtttgtcatcagtctcagcccgcttttcagcgggcttcattgtttttaatgcttacagcactgccacaatcgcttcgcacagcggagccatgttatctggtgtcatcccggccacatttacgcgaccagaagcaaccgcatatacgccaaactcttcgcgcagacgcagcacttgttcttttgtcaggccactgaaggagaacatgccgttctgtttgatgataaagctgaagtcgcggtttgcgcctttttcctgcagcgtattgacgaacaactgacgcatacgctgaatacgctggcgcatatcagtcagctcttgttcccaaatcgcacgtaacgcatcgttgctcaggatggtggcaacaacagaagcgccgtgtgctggtgggttagagtagttagcgcgaatcgccgctttcatttggctgaatgcgcgatcaacggtttcactgtcggcagcaaccagagtacaagcgccaacacgctcgttgtacaggccaaagtttttagagtaggaactggcaacaatcagctctttatgcatagccgcgaaagcgcgcagtccttcagcatcttcttccagaccacgggcaaaaccctggtaagcgaagtcaaacagcggtaaccagcctttctcaacggagagttgtgccagtgtttgccattgttccagcgtagggtcgataccggttgggttatggcagcagccatggaacagcactacgtcgccagcctgagcttcattcaggctgttaatcagtgcatcgaagtcaagagtgtgattttccgcatcataataagcgtattcacgaacttccagacctgcagagttaaagacgctcttatggttcggccagcttgggttgctcacccacacacgcttaacgctggtattttttgccaggaaatcggcagccacgcgtagtgcgccagtgccccccggagtctgtgccgtgcgagcacgtttgtcattgatcagggcgctacctttaccaaacagcagttcctgagtgcagcgaccaaattcagggatgccgtcaatgccgaggtaatttttggtggtttcattttcgagcagatactgttcagcctttttcacgctggtcagtaccggggttttgcccgtctcatctttatagacaccaatcccgaggttaattttgccgggacgttcatcggcacgaaacagatcggccaggcccagaatcgggtcggcaggagcggcggtaatgttctcaaacatgacgaggttccattatggttacagaagggaagtccgctatcagggtaacgggagatttacaaaattccaactattactgatgaaaacgcaggctgtttttgcaagacgtgagattgctctggaaggtataaaaaaaacaggaccaaagtcctgttttttcggcatttaacaaagaggtgtgctattagaactggtaaacgatacccacagcaacggtgtcgtctgaacctacgcccagtttgttgtcagaatcgatctggttgatgatgtagtcaacataggtggacatgtttttgttgaagtagtaggttgcgcccacttcaaagtagttcaccagatcaacatcaccgataccttctacgtctttcgctttagatttggtgtaagcgatggacggacgcagaccgaaatcgaactggtattgcgcaactaacagaacgtcttgcgttttgttggcgaagccgctggtgtttgtaaatttattagtgatcggcgtagcgttacgggtttcaccgtagttcgctgccaggtagatgttgttcgcgtcgtacttcagaccagtagcccactgttcagcttttttaccgttgccaagaggttgagcttcttgcaggttggtacggtcagctgcaccataagcaccaacgataccaaagccttcgtattcgtagctgatagaaccgccaacaccgtcgccgttagaacggcgtgcagtgtcacgctcgtttttacccaggtactgaacagcgaagttcaggccatcaaccagaccaaagaagttggagttacgataggtagcaacgccgccaacacgaccaacgaagaagtcatcgctgtatgcagtatcaccaccaaattctggcagcatatcggtgtaacccagtgcatcataaaccacaccgtagttacggccgtaatcgaaagaaccaacgtcagcgtatttaagacccgcgaatgccagacgcgttttgttaccagtttgagcgtcagcgccttcagagttgttaccctggaagttatattcccactgaccataaccggtcagatcggaattgatttgagtttcccctttaaaaccaagacgggcataggtcatgtcgccattgccaccgtaactgttttcaccgttacccttggaaaaataatgcagaccaacagctttaccgtacagatctactttgttgccatctttgttatagatttctgcagcgtttgcagtacctgctactaacagagcagggacgatcactgccagaatattgcgcttcatcattatttattaccctcatggttttttttatgacacctgccactgccgtcaataagttctgtcaataaaaatttacggaactattgatgagagtttggtgtctttatgtgtctgcaggcatctttccattcaaactaacgtttcgctaccgtgaaagtgctacaaagataaagatttggtttcaaaaagaaaaaatatgtaaccaaaagtaaaatttaaggaactttgtgaacaccgtcatatttccatagagacgtgatgatatttacagcaattttaatctatttatatgatttccttatatttaaattaactaaacggaaattttgtttctgatggaaactttatcgacctggcacaaaatcttctttcagacatccagaatgccaaaaaatagtatgaaaattgtgctattagctaagaaaaaactaatccgcaataagaatgcggattagtttttgcgcgtaaatgttgcaatgtaatattccgtaacaggatgatcgttatggcggggttgcaaatagattgcttgacttaacaaacagataacttgacagaaaagataaaaaaagagccagcgggcgctggctcttgaagacgctaaattagaagctggcgttacgcggagtacgtgggaacggaatcacatcacgtacgttttgcacgccagttacgtaagcaatcagacgttcaaaaccaagaccgaaacctgaatgcggaacagtaccgtagcgacgcagatcgcgataccaccagtaatcttctttattcaggcccatttccagcatacgctcgtccagcacgtccagacgttcttcacgctgggagccaccaatgatctcaccgatgcccggagccagaacgtccatagccgcaacggttttaccgtcttcgttaaggcgcatatagaacgctttaatatctttcggatagtttttaaccactaccggtgctttaaagtgttcttccgccagataacgctcatgctcagaagagagatcgactccccagtaaaccgggttttcaaacttcctgccgcagttttcgagaatggtcactgcgtcggtataatccacctgcgcaaaatcggcttcaatgaagcgttccagacgtgaaacggcatctttatctacgcgttcagcgaagaatttcatgtcgtcagcgcgttcttcgagaaccgctttgaagacatatttcagcatggcttcagccagacccgcaatatcgttcaggttagcaaacgccacttccggctccagcatccagaattccgccaggtgacggctggtgttggagttttcagcacggaaagtcgggccgaaggtataaattttggacaatgcgcaagcgtaggtttcgccgttcaactggccagatacggtcaggaaagactctttaccaaagaagtctttgtcgaaatccactttgccctgatcgttacgcggcaggttttccagatccagcgtagaaacgcggaacatttcgcctgcaccttcggtatcagatgcggtaatcagtggcgttgaaacccagaagaatccctgctcgttaaagaagcgatgcagcgcctgcgccagcgtatggcgaacgcgcgcgacggcaccaatcaggtttgtgcgcggacgcaggtgagcgacttcacgcagatactcaatgctgtggcgttttgccgccatcgggtaagtgtctggatcttcaacccaaccagcaacttcaaccttgctggcctgaatttcaaattgttgcccctggcccggcgacgccacgactttacccgtcacaatgaccgagcagccggtggtcagacgcaggacgtcttcattgtaattgggcagagaattattgatgacagcctgtacaggatcaaagcaggaaccgtcataaacggcgaggaaggagatgccagcttttgaatctcggcgggtacgtacccatccgcgcacggtgacttcgctgtcaacggctacacggccctggagtacgtcggctacaggcacaacgctcataatattctctctgttaatagtcggaaaaaataaacacttgtccacccgtaaatggggggatacctatgttacctggcatctgcaatcagacaagcagaattcgcaaatgcagcgaaagatttcggaattaaaggtaaaaaaagggagccgattagctccctgatgatattaactggcttttttaatatgcggaaggtcgaacgctttgcgcagcgcccgaacaaacgctttatcatggcagatagttttgccagggctgtcagaaagtttcgccaccggtttaccgttacactctaccaacttaatgacaatattcaggggttttacctgggggatatcgcaggtcaggcgagtcccaataccaaaacttaattgcacgcgggaagagaagtggcggtatagctcaaccgctttgcgtaaatccagattgtcagagaaaaccagcgttttactctgtggatcaattcccagcttttcataatgtgcaatggctttttcaccccattcaaccgggtcgccagagtcatgacgcaggccctgataccgactagcgaactcgacaccgaaatcacgcaggaaagcatccatagtgatgcagtcggttaatgcaatgccaagttggtcgggatactcttccagccaggcagcaagtgcagctcgctggctgttggctagatccgggctgatttgctgatgtgcctggaaccattcgtgtgcctgtgttcccatcggcgtgagggaaagccgacgcgccagatcgtagttgctggtgcccacaaaccaggattcctgttgcagacgcttaacgatggtttcttgtacttcgcgagaaaaacggcgacgggtgccaaaatccatcagatggaagcgcgacatatcaagaccggcggttaacgccgagaagtcgactaatttgctttccagcgtgtcgagggcttgcgcaacgtcggcctgcggtgagcgatagcgatgtaccatttcactgataaccgccagcaaaggaacttcccagaggatgacttcacgccacgggccgcttaaacgaatatccagcttgccattatcgttggacacggtgacttgttccgggttaaagcggaactcgcgtaaccagttaagatagtcggccttaaagaaaggcagggcagaaagccactgatattcatcatcctgcaggcgcaggtgctgcatcgcctgaacctgttcacgaatagcatcggcataaatacccagcagatcgtcacctcggcaacgaaactccgccgcgacatgcacatcgtaatagtgatgaaacacggcttgctgcatatgcaacttataagcatctgtatccagcaacgagtgcagaacaggagaagcgaattgtgtcataggtgcgcagtagcgtcctcgtacaggagcgtttagtacaataaacatcttcaggaactgctggagtataccttgtttcgcaatttattgaaccccgatcacaccatatgccacctttctggtcgatggcattacgcggtgtatgttataaaaatgtagcaataaaggcgtttgtacctgaaaagatgaagattctgcatagcgcgatttacgcaacaggaatagactgaacaccagactctataaaagatgctaaaggttatttatgactcaacagccacaagccaaataccgtcacgattatcgtgcgccggattaccagattactgatattgacttgacctttgacctcgacgcgcaaaagacggtcgttaccgcggtcagccaggctgtccgtcatggtgcatcagatgctccccttcgtctcaacggcgaagacctcaaactggtttctgttcatattaatgatgagccgtggaccgcctggaaagaagaagagggcgcactggttatcagtaatttgccggagcgttttacgcttaagatcattaatgaaataagcccggcggcgaataccgcgctggaagggctttatcagtcaggcgatgcgctttgcacccagtgtgaagccgaaggtttccgccatattacgtattatctcgaccgcccggacgtgctggcgcgttttaccaccaaaattattgccgataaaatcaaatatcccttcctgctttccaatggtaaccgcgttgcgcaaggcgaactggaaaacggacgccattgggtacagtggcaggacccgttcccgaaaccgtgctacctgtttgcgctggtggcaggcgactttgatgtactgcgcgatacctttaccacgcgttctggtcgcgaagtagcactggagctgtacgtcgatcgcggcaaccttgatcgcgcgccgtgggcgatgacctcgctgaaaaactccatgaaatgggatgaagaacgctttggcctggagtatgacctcgacatctatatgatcgtcgcggtggatttcttcaatatgggcgcaatggagaataaggggctgaatatctttaactccaaatatgtgctggcccgcaccgacaccgccaccgacaaagattacctcgatattgaacgcgttatcggccatgaatatttccataactggaccggtaaccgagtgacctgtcgcgactggttccagctcagcctgaaagaaggtttaaccgtcttccgcgatcaggagttcagctctgaccttggttcccgcgcagttaaccgcatcaataatgtacgcaccatgcgcggattgcagtttgcagaagacgccagcccgatggcgcacccgatccgcccggatatggtcattgagatgaacaacttctacaccctgaccgtttacgagaagggcgcggaagtgattcgcatgatccacaccctgcttggcgaagaaaacttccagaaagggatgcagctttatttcgagcgtcatgatggtagtgcagcgacctgtgacgactttgtgcaggcgatggaagatgcgtcgaatgtcgatctctcccatttccgccgttggtacagccagtccggtacaccgattgtgaccgtcaaagacgactacaatccggaaaccgagcagtacaccctgaccatcagccagcgcacgccagccacgccggatcaggcagaaaaacagccgctgcatattccgtttgccatcgaactgtatgataacgaaggcaaagtgatcccgttgcagaaaggcggtcatccggtgaattccgtgctgaacgtcactcaggcggaacagacctttgtctttgataatgtctacttccagccggtgcctgcgctgctgtgcgaattctctgcgccagtgaaactggaatataagtggagcgatcagcaactgaccttcctgatgcgtcatgcgcgtaatgatttctcccgctgggatgcggcgcaaagtttgctggcaacctacatcaagctgaacgtcgcgcgtcatcagcaaggtcagccgctgtctctgccggtgcatgtggctgatgctttccgcgcggtactgcttgatgagaagattgatccagcgctggcggcagaaatcctgacgctgccttctgtcaatgaaatggctgaattgttcgatatcatcgacccgattgctattgccgaagtacgcgaagcactcactcgtactctggcgactgaactggcggatgagctactggctatttacaacgcgaattaccagagcgagtaccgtgttgagcatgaagatattgcaaaacgcactctgcgtaatgcctgcctgcgtttcctcgcttttggtgaaacgcatctggctgatgtgctggtgagcaagcagttccacgaagcaaacaatatgactgatgcgctggcggcgctttctgcggcggttgccgcacagctgccttgccgtgacgcgctgatgcaggagtacgacgacaagtggcatcagaacggtctggtgatggataaatggtttatcctgcaagccaccagcccggcggcgaatgtgctggagacggtgcgcggcctgttgcagcatcgctcatttaccatgagcaacccgaaccgtattcgttcgttgattggcgcgtttgcgggcagcaatccggcagcgttccatgccgaagatggcagcggttacctgttcctggtggaaatgcttaccgacctcaacagccgtaacccgcaggtggcttcacgtctgattgaaccgctgattcgcctgaaacgttacgatgccaaacgtcaggagaaaatgcgcgcggcgctggaacagttgaaagggctggaaaatctctctggcgatctgtacgagaagataactaaagcactggcttgataaataaccgaatggcggcaatagcgccgccattcggggaatttacccctgttttctcaggcgagtttcagattcaccacgttgcatcacccgttgcaacacctccgcttccagctccgctaatcgcaccgaccctaatcgacgcggacgggggatatccactgtcaaatccagaccaatttttccctcttcaattaacagcacccggtcagccatcgctaccgcttcgctcacatcatgcgtcaccaacagtacggtaaagccgtgctcctgccaaagtgacacaatcaaatcctgcatctcgagtcgcgttaaggcgtccagcgccccgagcggttcatcaagcaacaataatcccggtcgatgaatcaacgctcttgccagcgccactcgctgtttctgcccgccagaaagtgcggcaggccattcccctgcgcgattctccagtcctaccgcagccaacgctcgacgtgcggcatcgcgccactggcctttaaggcctaacccaacgttatcaatcaccgatttccacggtagcagacgcgcatcctgaaacatcattcgcgtgtcttcctgaatttcagccagcggtgtggtgcccgctaacacatcgcctgcggttggcgtttccagacctgccagcaggcgcagcagggtacttttgccaccaccgctgcggcccaccaccgccacaaactgacctgccggaatatgtaaatccagttggttcaggacgatattttccgcgtaatgtttgcttactgcattgagcaacaatggcgtgccctggttcagacgagcagtattcataccgtggcctccttcaaatgataagccgggttccagcgcaaccagaggcgctctaacagctgcgcgctgacgtcagccagtttgccgagcagggcgtaaagaataatagcgactaccaccacgtccgtttgcaaaaactcccgcgcattcatcgccagataaccaatgcctgaattggcagaaatggtttcggcaacaatcagcgtcagccacatcaggcccaacgcaaaacgcacgccgaccataattgagggcagggcaccaggcaggatcacatggataaacagcggtatgccggataatccatagctacgcgccatctccaccaacccgcgatcgatattacggatgccatgccaggtgttgatataaatggggaatagcgtaccgagcgccaccagaaagatttttgcggattcatcaatgccaaaccacaaaatcaccagcgggatcagcgccagatgcggcacgttgcgcaacatctgaattgaggtatccagcagccgttctccccagcgagatagcccgctaatcagtcccaaaatcaaccccagcgatccgccaattgaaaagccaatcagcgcccgccaggagctgatcgccagatgctgccacagttcgccgctggcggagagcgtccagaacgccgtcaccactccttccggtgaaggcaaaatacgcgtcgacagccagccaaccgaggaggccagttgccacaccgccacgatgcccaccggtaaaaaccagggggcaacgcgcaataaccacttcttcactggcgttgccattatttcttccttagctttgcgcgactttacgggggataaaatcattcgccaccgcttcgccttgcggattcagcggctgcggctggggaatttccgggatggcgacatccagaagcgggaacagcaactcgccaacccgatacgcttcttccagatgcggatagcccgaaagcacaaaactgtcgatgccaagcgcggcatattcgttgattcgcgcagcgaccgtaggaccatcgcccaccagcgccgtcccggcaccgccgcgcactaagccaacgcccgcccataaattggggctgatctccagattgtcgcgcttgccgttatgtaacgccgccattcgctgttgccctacggaatccgtccgggcgaatgcggcctgtgctttggcgatagtttcatcatcaagatgcgagattaaccgctcggcggcctgccacgcttcgtcgttagtttcacgaacaatcacatgcagacgaataccgaaacgaattttgcgtccatgcgcggcagctttcgcccgcacttgttcgattttctctttaaccagttccggcggttcgccccaggtgaggtagagatcaacctgttctgccgccagctcctgggcgacatctgacgatccgccaaagtaaagtggcggatacggctgttgaatcgccgggaagagcagttttgctccgcgcacatgaatatgtttaccgttgaaatcgacggtttctctctgcaataaacgccgccagacctgggtaaattccgccgaggcttcgtagcgctcgctatgatcaaggaacactccgtcgcctgccagctcttgtggatcgctgcctgtgaccaggttaaacaacgcacgtccatttgagagacggtcaagcgtggcggcctggcgggcggcaacggtaggtgaggttacgctgggacgcagggcgacaagaaacttcagccgctgcgtcaccgggatcatcgatgcggcaaccagccacgcatcttcgcaggagcgccccgttggaattagcacaccggtatagccaagacgatccgccgcttgcgcaatttgttgcagataaccgtgatcaaccgggcgtgaaccttcttccgttcccagataatgcccgtcaccgtgggtcggtaaaaaccagaacatattcagactcataattgttttccttccagttgagtgggctgccagatgcgctggcgaatatcgacttttttcggcaccagacgattttcataaaacagatctgccgtttgctgctgtaaggcggcaacctcggcgttaaccggtttgatggtggtaggagggcgatgatctaagtaagaggcaatcaccggtgccggtaagcccatcgtttttgccagtaaagcgatgctttgctcgcgctggctgcgggttaacgcatcggcctcactaaaggttgccagtacgccctgaataaaagcgccgtttttttctgcatagggacgagctgccagataaaacgatccagtttgattgagatcggtgccgtctttcagcacccgcacgccgccctgtaataatgcagcagagtagtagggatcccagatagcccaggcgtcaacgttaccttgctggaacgcggcgcgggcatcagcgggcgtcaggtaagtgggttggatatcggtaaacttaagtccggcctgacgcagtgcacgcagtaaaaggttgtgtgaactggaacctttctgaaaggcaactttgtgacctttaagatcggctacggttttgatcgggctgttttctgccaccagaatcacttcggctttgggcttcggtggctcgacgcccacgtacaccaaatcagccccggcagcctgggcaaagattggcggaatatccccggtactgccgagatcaatactgccaacgtttaacgcttccaacatttgcggacccgcggggaactccacccaggagatttttgattccggatagcgtttttccagtaactggtggctttttgccagcaccataccaatactgcctttctgatagcctatacgtaacgcttcaggcgaggattctgcagcaaccgcaaaagtagagacgctaagcaatcccgccagcgccagtttaatgatgttacgcatgggcattacctcgcagagacagaaggtcaggaacctgaacatcgcggcggtgcaatgcctgccagaaagtttctagcgcggtatcaagacgggtttgcagatttggcgtgaactggggtctgtgatggtaatcaattacttgtgagtcatcggcaaacacgccgtgcaggatctcctgagctttcagtgcgcttaaaactggtttaagggcataatcgaccgccagcagatgggccacggtaccgcccgtcgccagcggtagcaccactttgccttgcaaagcgcgttctggcagcaggtcgagcagggttttcaacgcaccggaataggcggctttatacacaggcgtggcgacaatcagcccatcggcctgttgcagctgttcggtgaaggtcttgagtgccggactatcgaaacgagcataaagtagatcttccggggcgaagttttgcagattccagtgataaacctctacatccaggccatttagtttttcccgcgcatattccagcaaggagctggagcgagaaggaaagcgaggactacccgccagggtgatgacacgcatactctctccttataaccaattgttctttttttgttaacattgataacaattcggtcagtctgtcggagagacaagaaaattccaaatataaattttgtgtatctttttctgaaaataaactaaagaaagggctttatatatcacgcatatttatttattggatagtcattagatgttgaatcaatgaattactcgttcagttaatatttaaatattcatgaaatctataaattaaagatttgtcacttattggatttagtatgcttgatttaaatggcggacaattattgttattattaagtctaatgtcatttaaaggcattatcatatttacgaagagatcaggatgataacgatgaaaaaaagtgtattgacggcgtttataactgtggtatgtgcaacgtccagcgttatggctgctgatgataatgctatcacggatggctcagtaacatttaatggtaaagttattgctccagcttgtaccctggtagctgcgacgaaagattccgtggtgactttgccagatgttagtgccacgaagttgcaaaccaatggtcaggtttctggcgtgcaaattgatgtgccaattgaattaaaagattgtgatactaccgtaacaaaaaatgcaacgttcacctttaatggcactgcggatactactcagattacagcgtttgctaaccaggcctcatctgatgctgctacaaacgtggccctgcaaatgtatatgaatgatggtacaacggccatcacgccagacacagaaaccgggaacattttgttgcaggatggagatcagacgttgacttttaaagttgattatatcgctacggggaaagcgacttcaggtaatgtgaatgcggtaacaaatttccatattaactattattaatagaactcattaattgttttattaattagtacccctccagtgttctggaggggatattcatattttttaagagtgactatttatgaaaacttgcataacaaagggaattgtgaccgtaagtttaacggcaatattactcagctgctcatccgcatgggcggcaggtaaaggcgggattggacttgcagcaacacgtcttgtttattcagaaggtgaagagcaaatttcactgggtgtacgtaacaccagtccggatgttccttatcttattcagtcatgggtgatgaccccagataataaaaaatcagcagactttattattacaccaccgctatttgtgctgaatccggcaaatgagaatctgttacgcattatgtacattggagcgccgttggcgaaagacagagaaacccttttcttcactagcgtacgggcagtcccttcaacaacgaagcggaaagagggaaataccctgaagattgccacacaaagcgtcatcaaacttttctggcgaccaaaaggtttagcgtatcccttaggcgaggctccggcgaaactgcgttgcacttcgtcagctgacatggttacggtcagtaacccaacaccttatttcattaccctgacagacctgaaaataggtggaaaagtagttaaaaatcaaatgatttccccctttgataaataccaattttctctgccaaagggggccaaaaatagcagcgtaacgtatcgaaccatcaatgactacggggcggaaacgccgcaactcaactgtaaatcgtaagccgtcttcagttaagagagcgagatgtatagaactcatcgacaacacagcctgttaagctctggtggagtgccatcgtttattggtgggctggtggtgtttgtgtcggcagcgttcaatgcacaagctgaaacctggttcgatcctgcttttttcaaagatgatccctcaatggtggccgatttgtctcgtttcgaaaaaggacaaaaaataacgccaggggtttatcgtgtcgatattgttctgaatcagacaattgtagatacgcgcaacgtcaattttgttgagataacgccagagaaggggattgccgcctgtttgacgactgaaagcctggatgcaatgggtgttaatactgatgcgtttccggcttttaaacaactggacaaacaagcgtgtgtgccattggcggagattattccggatgccagcgtaacgtttaatgtgaataaactccgtctggaaatttcagtaccgcaaatcgccatcaaaagtaatgcccgtggttatgtcccccctgaacgttgggatgaagggatcaacgcgctattactgggatattcgtttagcggggctaacagtattcatagcagcgcagacagtgattctggcgacagctattttctgaatttaaacagtggcgttaatttaggcccatggagattgcgcaacaattcaacatggagtcgtagtagtggccaaaccgcagaatggaagaatctcagcagctatttgcaacgggcggttattcctctgaaaggcgaactgaccgtaggtgatgattatactgcaggcgattttttcgatagtgtcagctttcgtggtgtgcagctggcgtcagatgacaacatgctgccagacagcctgaaagggtttgcgcctgtggtgcgtggtatcgccaaaagcaatgcccagataacgattaagcaaaatggttacaccatttaccaaacttatgtatcgcctggtgcttttgaaattagtgatctctattccacgtcgtcgagcggtgatttgttagttgaaatcaaagaagcggacggcagcgtcaatagctacagcgtaccgttctccagtgtgccattactccagcgtcaggggcgaatcaaatacgcggtgacactggcgaaatacagaaccaatagtaatgaacagcaggagagcaaatttgcccaggccacgttgcagtggggcggaccgtggggaacgacctggtatggtggtggacaatatgctgaatattaccgtgccgccatgtttggtctgggatttaacctcggcgatttcggagcaatttcgttcgatgcgacccaggcgaagagtacgctagcagatcaaagcgaacataaaggtcagtcatatcgttttctgtatgccaaaacgctcaaccacttgggcactaactttcaattgatgggctatcgctattcgacgtcgggtttctacaccctttccgacaccatgtataaacatatggatggctacgaatttaatgacggtgatgatgaagatacgccgatgtggtcgcgttattacaatttgttttacaccaaacgtggcaaactgcaggtcaatatctcccagcaattaggcgagtacggttcgttttatttaagtggtagccagcaaacttactggcatacggatcaacaggatcggctattacagtttggctacaacacgcaaattaaagatctttcgctggggatttcctggaactacagtaagtcccgtggtcaacctgatgctgatcaggtgtttgctctaaatttttccctgccgctcaatctgttgctccccagaagtaatgatagctataccaggaaaaaaaattacgcctggatgacctctaacaccagtatcgataacgaagggcacactacacaaaacctgggtttaacggagacattactcgatgacggtaacctgagctacagcgtgcaacagggatataacagcgaggggaaaacggctaatggtagcgccagcatggattacaaaggggcgtttgcggatgcccgagtgggctacaactacagcgataacggcagtcaacaacaactgaactacgctctttcaggcagtttagttgcccattcacagggcattaccctggggcaatcgctgggggaaactaacgttctgattgcagcaccaggcgcagagaatactcgtgtggcgaacagcaccgggctgaaaactgactggcgcggatataccgttgttccttatgccacttcttatcgggaaaatcgaatcgcacttgatgcggcgtcgttaaaacgtaacgtggatcttgaaaatgcagtagtcaacgtggttcccaccaaaggggcgttggttctggcggagttcaatgcccatgcgggtgcaagggtattaatgaaaacatcaaagcagggtataccgctgcgttttggcgcgatagcgacgctggacggcgtacaggctaatagcggcataattgatgatgatggctcgctctatatggcgggtttaccggcgaagggaacaataagcgtgcgctggggcgaagctcccgatcaaatttgtcatatcaattacgagcttaccgaacaacaaattaactctgcgattacgcgaatggatgccatatgcagataatctttggagaaaaatgcgtgtcattactacgactattttttgccgccgtcttaatgttatggtgcgctcaaaccgctgcttatagcgggcagtgtcatactactcaggggaatccgtatattggcgtcaattttggcgttaaaaccctggaggaagaagcaaatacggcaggggtagttaaagacaaattttatcagtggaacgaatcgaatgattattatgtttcctgtgattgcgataaagacaatgtcagaagtggccgatgggcattcgccgcggattcaccgttagtctatttaggcgacaactggtacaaaattaatgactatcttgccgccaaagttttattgcaggttaaaggcagttctcctactgcggttcctttcgaaaacgtgggcacagggggggatacccgatggcatatttgcgaccctggcggtcaacgtttaggtgggcagggggcaagcggtaatagcggtagcttttccctgaaaatattgcagccgttcgttggctcggtcgtcattcctcctatggcgctggcgcgattatatgaatgctacaacatacccgcaggtgattcctgcacgactacaggtacaccggttttagtgtattacctgtctggtacgatcaattcacttggctcatgttccgtcaatgccggagagacaattgaagttgatttaggtgatgtcttcgctgccaatttccgtgttgtagggcataaacctcttggggccagaacggcagaacttgcaattccagtcaggtgtaacacgggaaacgcgggattagttaatgtcaacctgagtctgacggcaaccacagaccccagctatccccaggcgattaagacgtcacgtcctggcgtgggcgtggtggtgaccgatagccagaacaacattatttcccctgctggtggaacattaccgctctctattcctgatgatgcagacagtatcgcgcgaatgaatgtctatccagtcagcacgacaggtgtaccaccagaaaccgggcgatttgaagccacggcaacggtgagaataaattttgattaacgcgtgaacgtatgaagaaaaaaacgatatttcagtgcgttatcttgttctttagcattcttaacatccatgtcgggatggctgggcctgaacaagttagtatgcatatttatgggaatgtggtcgatcagggctgtgatgtcgccaccaaaagtgcattacaaaatattcatattggtgattttaatatcagtgattttcaggccgcgaataccgtaagcactgctgctgatttgaatatcgatatcaccggttgtgccgctggtattactggcgcggacgtcctttttagcggcgaggctgacacccttgcgccgacactgctcaaactaactgacacaggcggaagcggtggtatggcaacggggattgccgtgcaaattcttgatgcgcaaagtcagcaagaaatcccgctcaatcaggtccagcctcttacgcccttaaaagccggggataacacactcaaatatcaacttcgttataagtccacaaaggcgggagcaacgggcggtaatgcgacggcggttctctattttgatctggtttaccagtgaaggagtgatgttgaaacggataatctggattctgttcttattgggattaacgtggggctgtgagctatttgcccatgatggcacggtcaacattagcggatcgtttcgccgtaatacatgcgtgctggcacaggatagcaagcaaatcaatgtgcagttaggcgatgtctcgctgacacgtttttctcatgggaattatggcccggagaaatctttcatcattaatttgcaggattgcggaacagatgtcagcacggttgacgtcaccttttcaggaacccccgacggagtgcagagcgaaatgttgtccattgaaagtggtacggatgcagccagcgggctggcaattgcgattctggatgatgcgaagatattgattccgcttaaccaggcgagtaaagactacagcctacatagcggtaaggtgccattaactttttatgcgcaattgcgacctgtcaatagcgatgtgcagtcgggtaaagtgaatgccagcgcgacatttgtacttcattatgactaatacgtggaacagattggcgctcttgattttcgccgttttatcgctgctggtggcgggtgaattgcaggcaggagtggtggtcggcggaacgcgatttatctttccggcagacagagaatcgatatctattttactgactaataccagtcaggaatcctggcttattaacagtaaaatcaaccgcccaacgcgttgggccgggggggaagcgtcgacagtgccagcaccattactggccgctccgccacttattctcctgaagcccggtacgacaggcacgttgcgcttgctgagaacggaaagcgacatcttgcctgtggatcgcgaaacgctatttgagttaagcattgccagcgtgccatccggcaaagttgaaaatcagagcgtaaaagtggcgatgcgctcggtatttaaactgttctggcgacccgaaggtttgccgggcgacccgctggaagcttatcaacaattacgctggacacggaattcgcagggtgtacaactcactaacccaacgccttattacattaacctgattcaggtgagtgtaaatggtaaagcgttaagtaatgtgggagttgtgccgcctaaaagccagcgtcagacaagctggtgtcaggcaatcgcaccgtgtcatgtcgcctggcgggcgataaatgattacggcgggttgagtgcaaagaaggagcaaaatctgccctgaaacaggttcggaaaacgtttgcgttttttttgccgcaggtcaattcccttttggtccgaactcgcacataatacgcccccggtttgcacaccgggaatccaggagagttcatgtactaccccttcgttcgtaaagcccttttccagctcgatccagagcgcgctcatgagtttacttttcagcaattacgccgtattacaggaacgccgtttgaagcactggtgcggcagaaagtgcctgcgaaacctgttaactgcatgggcctgacgtttaaaaatccgcttggtctggcagccggtcttgataaagacggggagtgcattgacgcgttaggcgcgatgggatttggatcgatcgagatcggtaccgtcacgccacgtccacagccaggtaatgacaagccgcgtctctttcgtctggtagatgccgaaggtttgatcaaccgtatgggctttaataatcttggcgttgataacctcgtagagaacgtaaaaaaggcccattatgacggcgtcctgggtattaacatcggcaaaaataaagatacgccagtggagcagggcaaagatgactatctgatttgtatggaaaaaatctatgcctatgcgggatatatcgccatcaatatttcatcgccgaataccccaggattacgcacgctgcaatatggtgaagcgctggatgatctcttaaccgcgattaaaaataagcaaaatgatttgcaagcgatgcaccataaatatgtgccgatcgcagtgaagatcgcgccggatctttctgaagaagaattgatccaggttgccgatagtttagttcgccataatattgatggcgttattgcaaccaataccacactcgatcgttctcttgttcagggaatgaaaaattgcgatcaaaccggtggcttaagtggtcgtccgcttcagttaaaaagcaccgaaattattcgccgcttgtcactggaattaaacggtcgcttaccgatcatcggtgttggcggcatcgactcggttatcgctgcgcgtgaaaagattgctgcgggtgcctcactggtgcaaatttattctggttttatttttaaaggtccgccgctgattaaagaaatcgttacccatatctaattatttcttcgaattcctctttataagataatcagggctttattttcagccctggttgttttatattcatcgctgttgcttatttagacattttgtacttttattgttgaggttattaagcgaagcgacaatggattgtgttgctgcggttttatagggtaggggagaggcagatgcgaattaaaccagacgataactggcgttggtattacgatgaagagcacgatcgaatgatgctcgatttagccaatggtatgctatttcgctcacgttttgcgcgcaagatgttgactccagatgccttttctcccgcaggcttttgcgttgacgacgccgcgctctatttctcttttgaagaaaagtgccgcgattttaatttatctaaagaacaaaaagccgaactggtgctgaatgcactggtagcaattcgctatctcaaaccgcaaatgccgaaaagctggcattttgtttcccatggtgaaatgtgggtgcccatgccgggcgatgcggcctgcgtttggttgagcgatactcacgagcaggtcaatttgctggtcgttgaatctggcgaaaatgccgcactatgcctgctggcacaaccctgcgttgttattgcgggtcgcgcgatgcagttgggcgacgccattaaaatcatgaacgacaggctgaaaccgcaggttaatgttgacagcttcagcctcgaacaggcagtctaacgcgccaacttaagtgcagtcttcggtacacagctacagcaaagaatggtgccatcatcgcccattgctgattttttcagcggcgtgacttcgccttctaaaagctgaacacggcaacttccacaaatgcccgcgcggcaagaataagggatacgaattccctgattttctaattgctccagcaacacctgttggttatttccacgaaatgcctgtccctgccagtcaatatctacatttgcgtccggttgttgcgtgatgttggcggtatcatcagcggcagctgcgccgtaaatttttgccggagccgttgccagaatttccacctcatcgccaacgcgaatcacgccgctattacgggcaattaaattctgaccaaaatcgacatcgccgttatcctgggcagtgcggaaagattgcaatgtttttaatggttcgcctgccggatgtttttgccctttttctgggctgacggtggtgaaaatacagcggctacaaggtttaaccacatcaaacaccacatcaccaatgcgaatcactttccagcgatcttcttcccaggctgacgcgccggaaaccaccagattggggcggaattgctccatttttacactggccggacaacgttgttggagatcacgtaacgaggcttcgttagcaagaaggtaaggatagccatcagcaaatgacagaggtacagtgttgtggcgtttcacgcgccgggtcatttgtggccccacccagcgtaattgcacttcgcgggagaaaaatccacttagccatttgttgatcgcgtctggcgcaattcgcgcggtaaaatgtgtgccccaaacttcggttggtgcgtcttgtgtggcgaaatcagcaaaacgaacatatgcgctactgccatctggtgcggtgagatgcaagccatcatgcacaggtgaaggagtaaaccgtaccatctggggaaactggcgagcggtaataaacgtaccgtcaggttccgtgatcataaagatgcgatcgaaggccagaccactgacatctgccagagcatgtgtaagaccaatgccgcgcatcgatttaacaggatgaataaaaagccggattaatgtcgccacggtgcggtcctcaaatgaaaataagccctcaactttatgacatgacgcgcttattagctataatgcgcaacaattttcttagcgcctgtcccattaggctattttatttgtcagtttggccctgggttatgctcgaaatcctcacgtacttgtgtacgctccggtttctccgcgctgtccatgtccagactgactgcaacaattacgcctactgcggtaggctcttagagtaaaagtgacgatatgaattctctgtttgccagtacggcccgtgggctggaagagctgttaaaaactgaactggaaaacctgggggccgttgaatgccaggtggttcagggtggggtccatttcaagggcgacacacggcttgtttaccagagcctgatgtggagccgcctggcctcgcgtattatgttgccgctgggcgagtgtaaggtttacagcgatttagacctctatctcggtgttcaggcgatcaactggacagagatgtttaatcctggcgcgaccttcgctgtccacttcagtggtttgaatgacaccatccgcaacagtcagtacggcgcgatgaaagtgaaagacgcgatcgtcgatgctttcacgcggaaaaatctgccgcgtccaaatgttgatcgcgatgcgccggatatccgcgttaacgtctggctgcataaagaaaccgccagtatcgctcttgatctgagtggtgatggtttacatctgcgtggctatcgcgatcgtgctggtattgcgccgatcaaagaaaccctggcagccgctattgtgatgcgatccggctggcagccaggaacaccgctgctcgatccgatgtgtggttccggtacgttgctgattgaagcagcgatgctggcgaccgatcgcgcaccaggcttgcaccgtgggcgttggggctttagcggctgggcgcagcatgatgaagctatctggcaggaagtgaaagcggaagcgcaaactcgcgcccgtaaaggcctggctgagtatagctctcatttttacggttcggacagcgacgcacgggtgattcaacgtgcacgcactaacgcccgtcttgcggggattggtgaactgatcacctttgaggtgaaagatgtcgcgcaactgaccaatccgctgccgaaagggccgtacggcacagtgttgagcaacccgccatacggggaacgtctggacagcgaaccggcgctgattgcgctgcatagcctgctgggtcggatcatgaaaaaccagtttggtggctggaatctctctttgtttagtgcctcgccggatctgctaagctgcttgcagctgcgtgcagacaaacagtacaaggcgaaaaacggcccgctggactgcgtacagaaaaattaccacgttgccgaaagcactccagacagcaaaccggcgatggtagcggaagactacaccaaccgcctgcgtaagaacctcaaaaaattcgagaagtgggctcgccaggaagggattgaatgttaccgcctgtatgacgccgatctgccagaatataacgttgccgttgaccgttatgccgactgggtggtggtgcaggagtatgcgccgccaaaaactattgatgctcacaaagcgcgtcagcgtctgttcgatattatcgctgcaaccatttcggtactggggattgcgccaaacaaactggtgctgaaaacccgtgaacgccagaagggcaaaaaccaataccagaaactgggcgagaagggcgagtttcttgaagttaccgaatataacgctcacttgtgggtgaacctgacggattatctcgatactggtctgttcctcgatcaccgcatcgcccgtcgtatgctcggtcagatgagcaaaggcaaagatttcctcaacctgttctcttataccggcagcgccaccgtgcatgcgggattaggcggtgcacgcagcaccaccaccgtggatatgtcgcgtacttatctggaatgggcagaacgcaacctgcgtctgaatggcctgaccgggcgtgcgcatcgcctgattcaggccgattgcctggcgtggctgcgtgaggcaaatgaacagttcgatctgatctttatcgatccgccaaccttctctaactcaaaacgaatggaagatgcgtttgatgttcagcgcgatcatctggcgctgatgaaagatttgaaacgtctgctgcgtgcaggtgggacgatcatgttctcgaacaacaaacgtggcttccgtatggatctcgacggcctggcaaaactgggactgaaagcacaagaaattacgcaaaaaacgctctcccaggatttcgcccgtaaccgccagatccacaactgctggctgattaccgcagcctgaaaggaatagtaatgtcattaatcagtatgcatggcgcatggctgtcgttcagcgacgcgccgcttctcgataacgcagaactgcatatcgaagataacgaacgtgtttgtctggtgggccgcaacggcgcaggcaaatcgacgttaatgaaaatcctcaaccgtgaacaagggctggatgacggtcgcattatttacgagcaagatttgattgtagcgcgtctgcaacaggatccgccgcgtaacgttgagggtagcgtttatgatttcgttgccgaaggcattgaagaacaagcggaatatctgaaacgctatcacgatatttcgcgcctggtgatgaacgacccgagcgagaaaaatctcaacgaactggcgaaggttcaggaacagctggatcaccacaacctgtggcagctggaaaaccgcatcaacgaagtgctggcgcaactggggttagatcctaacgttgcgctgtcgtcgctttccggcggctggttgcgtaaagcggcattaggacgcgcgctggtgagtaatccgcgcgtgctgttgcttgatgaaccgacaaaccacctggatattgaaaccatcgactggctggaagggtttttgaaaactttcaacgggacgattattttcatctcccacgaccgttcgtttatccgcaatatggcgacgcgcattgttgatctcgatcgcggcaagctggtgacctatccagggaattacgaccagtacctgctggaaaaagaagaagccctgcgcgtggaagaattacaaaatgccgagttcgatcgcaaactggcgcaggaagaggtgtggatccgccaggggatcaaagcacgccgtacccgtaatgaaggccgcgtacgcgccctgaaagcgatgcgtcgcgaacgtggtgaacgtcgcgaagtgatgggtaccgcaaagatgcaggtggaagaggccagccgctccggtaaaatcgttttcgaaatggaagacgtttgctaccaggttaacggtaagcaactggtgaaagatttttctgcccaggttctacgtggcgacaaaattgccctgattggtccgaatgggtgcggcaaaaccacgctgctaaaactgatgctcggtcagcttcaagcggacagcgggcgtattcacgttggcaccaaactggaagtggcttatttcgatcagcaccgcgcggaactggatcccgataaaacggtgatggataaccttgccgaaggtaagcaagaggtgatggttaacggcaagccacgccacgtattgggctatttgcaggactttctgttccatccgaaacgggcgatgacgccggtacgtgcgctttctggcggtgagcggaaccgcttgctgctggcgcgtttgttcctcaaaccaagcaacttattgattcttgacgaaccgaccaacgatcttgatgtcgaaacgctggaactgctggaagaactgatcgacagctatcagggcacggtattgctggttagccacgatcgtcagtttgtcgataacaccgttacagaatgttggatcttcgaaggcggcggtaaaattggtcgttatgtcggcggttatcatgatgcccgtggtcagcaagagcagtatgtggcgctcaaacagcctgcggtgaaaaaaaccgaagaagccgccgcggcaaaagcagaaactgtaaaacgcagcagtagcaaactaagctataaattgcagcgcgaactggagcagctaccgcaattgctcgaagatctggaggcgaagctggaagccctacagacgcaagtggcggatgcttccttcttcagtcagccgcatgagcagacgcaaaaagtgcttgctgatatggctgctgcagagcaggagctggagcaagcctttgaacgctgggagtatcttgaagcgttaaaaaatggtggctgatcgcaaaatagtcgatttaaacagagacagctgacaacggtaaaattgcctgatgaactgggtttatcaggcatgaaaaccaacactttgttagtcatctgtaaaatagcgcatcattaaggagtaccaatgtgcgaacatcatcatgccgcgaagcacatcctgtgctcgcagtgtgacatgctggtggcgttaccgcgccttgagcatggtcagaaagcggcatgtccccggtgtggcacaacgttaaccgtggcgtgggatgcccctcggcagcgtcccaccgcctatgcgttggctgcactgttcatgctgttgctgtccaacttgtttccttttgtgaatatgaacgttgcaggagttaccagtgaaattacattactggaaattcccggcgtgcttttttctgaggactacgccagcctcggcacctttttcctgttgtttgtgcaactggttcccgcgttttgtctgataaccattctgttactggtgaatcgcgcggaattaccggtccgtttaaaagagcaactggcacgggtgctttttcaactcaaaacctggggaatggcggagattttcctcgcgggtgtgctggtcagtttcgttaaactgatggcttacggcagcattggggtaggcagcagctttctcccctggtgtttattttgtgtcctgcaactgcgcgcttttcagtgcgttgatcgtcgctggttatgggacgacatcgccccgatgccagaactgcgccagccgctaaaaccaggcgtcacggggatacgtcaggggctgcgttcgtgctcctgttgtacggcaatccttcctgctgatgaacccgtgtgcccgcgttgtagtaccaaagggtacgttcggcgtagaaacagcctgcagtggacactcgcgctgcttgtaacgtccatcatgctgtatcttccggctaatattttgcccatcatggtgacggatttattaggctcgaagatgccgtcgacgattctcgctggggtcattctgttatggagcgaaggctcttatcccgtcgctgcggtgatctttctggccagtattatggtgccaacgttaaagatgatcgccatcgcgtggctgtgttgggatgccaaagggcatggcaagcgcgacagtgaaagaatgcatttgatttatgaagttgttgagtttgtaggccgctggtcgatgattgacgttttcgttatcgcggtgctctcggcgctggtgcgtatgggaggtttaatgagtatttatccggcaatgggtgcattaatgtttgctttagtcgtcataatgacaatgttttctgctatgacgtttgacccgcgtttgtcgtgggatcgtcaacctgaatcagagcatgaggagtcctgacagtatggaatctaataatggggaagccaaaatccagaaagtgaagaactggtctcccgtgtggatatttcctatcgtcacggcgctcattggggcctgggttcttttttatcattacagccatcagggaccggaagtgaccctgatcaccgcgaatgcggaaggaattgaaggtggcaaaaccaccattaaaagccgtagcgttgacgtcggcgtggttgaaagcgccacactggctgatgatttgacgcacgttgaaatcaaagcgcggctgaattccggtatggaaaaattgctgcataaagacaccgtcttttgggtggtgaaaccgcagattggtcgcgaagggattagcggcctgggaacgctgctgtctggagtttatatcgaactgcagccaggcgcgaaaggcagcaaaatggataaatacgatttgctggactcgccaccgttggccccgcctgatgcgaaaggtatccgtgtgattctcgatagcaaaaaagccgggcagctctcgccaggagatccggtgctgttccgtggctatcgggtaggttcggttgaaaccagcaccttcgatacacaaaaacgcaatatcagctatcaactgttcatcaatgcaccttatgaccgactggtgaccaacaatgttcgcttctggaaagatagtggcattgcggttgatctgacgtcagcagggatgcgtgtggagatgggctcattgacaacgctgctgagtggcggtgtcagctttgatgtgccggaaggtctggatttagggcagccagtggcaccgaaaacagctttcgttttgtatgatgatcagaagagcattcaggattcgttgtacaccgatcacattgattatctgatgttctttaaagattcggtacgcggtctgcaaccgggagctccggtagagttccggggtattcgcctgggtaccgtaagcaaagtgccattctttgcgccgaatatgcgtcagacatttaacgatgattaccgtattccggtactgattcgtatcgagccagagcggctgaaaatgcagcttggcgaaaatgcggatgttgttgagcaccttggcgaattgttgaaacgtggtttacgcggatcgctgaaaaccggaaacctggtcactggtgcactgtatgttgatctcgatttctatccaaatacgcctgcaataaccggtattcgtgaatttaatggttatcagattatcccgaccgttagcggcggcctggcgcaaatccagcaacgactgatggaagcgttggataagatcaacaaactgccattgaatccgatgattgaacaggcaaccagtacgctttctgaaagtcagcgcacaatgaaaaacctgcaaacgacgctggatagcatgaacaagatcctcgctagccagtcgatgcagcagttgccgacggatatgcagtcaacgttgcgtgaattgaatcgcagcatgcagggcttccagcctggctccgcagcctacaacaagatggtggcggatatgcagcgccttgatcaggtgttgcgagaactgcaaccggtgctgaaaacgctcaatgagaagagtaacgcgctggtatttgaagcgaaggacaaaaaagatccagagccgaagagggcgaaacaatgaaaaagtggctagtgacgattgcagcactgtggctggccggatgcagctccggcgaaattaataaaaactattaccagttacctgtggtgcagagcggtacacaaagtaccgccagccagggcaatcgtctgttatgggtagagcaggtcactgttcctgactatctggcggggaatggtgtggtttatcaaaccagtgatgtgaagtatgtgattgccaacaacaacttgtgggccagcccgttggatcaacagttgcgcaacaccctggttgccaacctgagtacgcaactgcccggctgggtggttgcctcccagcctctgggaagcgcccaggacacgctcaatgttaccgtaacggagtttaacggtcgctatgatggcaaggtcattgtcagtggtgagtggctgttgaaccaccagggacaactgatcaaacgtccgttccgtctggaaggagtgcaaactcaggatggttacgatgagatggttaaagtgctggccggtgtctggagtcaggaagccgcttctattgcacaagagataaagcgtctaccttaattataaagatttgtaaatataaccgtctccggtatgttgcctgaggcggtttttttgtctctaacgtgcggaaaaatttgttcctcttcacattttttgtacaaccgacatgcccgtgtagctcacaaatatgacagtggcgtgaattttgcgcattgacggcagttatgattcgcggtattgcttaactgtgattgcacatttagtaatcactgttttcttttccaccagaaaccagtatgagggaaacgaggcatgaagagacaaaaacgagatcgcctggaacgggcacatcaacgtggttatcaggccggcatcgccggacgctcaaaagaaatgtgtccctatcagacgctgaatcaaaggtcacaatggctgggaggctggcgagaagccatggcggacagggtagtaatggcctgattctgtctctttaaaaagaaacctccgcattgcggaggtttcgccttttgatactctgtctgattataatcagaaggcagacgtatcctggaacagaccgactttcaggtcgctggcggtatagatcagacgaccatcaaccagcacttcgccatccgccaggcccataatcagacgacggttaacaatgcgtttaaagtgaatacggtaggtcacttttttcgctgtcggcagtacctgaccagtgaatttcacttcgccaacgcccagcgcgcggcctttaccttcgccgcccagccagccgaggtagaaccctaccagctgccacattgcgtccaggcccaggcatcccggcataaccggatcgccaataaagtggcatccgaagaaccacagatccggattgatatccagttctgcttcaacataccctttgtcgaagttaccacccgtttcggtcattttgaccacacggtccatcatcagcatgttcggtgctggcaattgcgggcctttagcgccaaacagttcaccgcgaccagaggcaagaaggtcttcttttgtataggattcgcgtttatctaccatgttctctgtaagccttattttattgaagcacgcaggatagctaacacgtgtacgctgaacaagtccgatcagttcggaataaaccagttcagccaacgtaatggccatggaaaacggtgacgtccttcctgttgcgatgcttgcgcgatacgttcctggatggtttgcatcagcgtcgtttggccttcgccatcccacaccagatttaataataacggcagtgcgtcagtcacatcgtctactgcccagatggtgaatttgccttcttctaccgctttcaccagttcactgtgaagacttaaatggcgaacgttagctgtggggataatgacaccttgtttcccggttaactcacgttgctggcaaatagcaaagaagccttcgattttctcatttaaaccaccgaccggctgggcgcgaccgaactgatcgactgaacctgtgatagcgatactctgattcaccggcacatcggcgagggcgcttatcagggcgcagagttcagccatcgaggcactatctccatcaacttcactgtatgactgctcaaatgtcagcgatgctgagaaggggatctgttgctcaagctgtagttccgacatcaggaacgcttgcatgatcatcatccctttcgcatggatattgccgccaagctccgctttgcgttcgatgtcggtgaattcaccatcgccaatatgcacaacgcagctaatgcgagaaggttcgccaaaagcgcgtggatgacccggaaattcaatgaccgaaagggcgttaatttgcccgatgcgttcgccttcggtttcaatcaggatttgctcctgaaggatctcatcctgcatacgttcagcgaggaaaccttcgcgccattcacgctgctgcagcattaagtttagctgctcgccggagaaggtgtcgccatcacacagggaggcgacctctttacactggcggaggatccactgcgggctaagcggaagtgtttcttgttcaccggtgtagcgtgctgcttcgcggataagtatcggccaggcatccgctcccggtgcaggtaagtgattatgtctggcggtaaatgtcacccagcgacaccactgggttactgactccgcatcgacaatctgcagagtatcttcaaattcgctataaatagcctgctctgaaagctctggctccatctcctggaaatcagccaatgattcgcgttcgcctaccagaatgactttcagcttcaatggcatcgaaggcacagagacggggagagggcgcgactcatcaaacgcaacccagtcaaaacgctcgcggttaacgatatttttcagccgcatccacagcagaggttgcgccagcagtgtacgcaaagagataatgagaataccgccatttgcctgatgcaccagaccaggctgcagggtaatgtcgccattaaactggcgcaggcagccaaagagttgctccgcttctacccagtcggcagcgacaacttgcgttaaagtcgcaaaattatcatctgcactcactgcgtgacgtaagcggatggagtggccggaaacctcatagtgaccgcccaccagttggcctgcatcgctttgtagcgtacgcgcggcattggcaataagattcagatactcagactcttccggggccttcgccagcataaaagaggaggatgctcgcgtatgcagcaactgctccagcgcaaattgcagccgcggttgagtatcactgaataaaggatcgttttcgtcaatcaaatgtggctgagcaaatatttcctgatagctatcggtatcaggaaccaggtcacgccatgcaagtttcgtaatggtcaaagttgatgttttttagtctgttgtcaaagccgcgattataccgtaaccggcactacagcacacgtagaaagcaccgacaatactcctggcatgggcgttaaagctcacaggatggagattcttttcttcactggcctaaaaagctgatattctgtaaagagttacacggtaacattgagatcgctatgaaatatcaacaacttgaaaatcttgaaagcggttggaaatggaagtatctggttaagaagcatcgcgaaggggagttaatcacccgttacatagaagccagtgccgcccaggaagccgtcgatgtgttgctctcgctggaaaatgaacccgtgctggtaaatggctggattgacaagcatatgaatccggaactggtcaatcgcatgaagcaaaccattcgggcaagacgaaagcgccattttaatgcggaacaccagcatacgcgcaaaaaatcgatcgatctggaatttattgtctggcaacgtctggctggtcttgcgcagcgtcgcggtaaaacgctttctgaaacgattgttcagctgattgaagatgcggaaaacaaagagaaatacgcgaataaaatgtcttctctgaagcaggatctgcaggcattgctgggtaaggaataactgacgaaagtcagttcaatttactaaaggcaaaaaaaaccccgcagcagcggggtttttctaccagacgagaacttaagcctgcggctgagttacaacgtctttgatacctttaacttcgatctctacgcgacgatccggagccaggcagtcgatcagtgcagcacgctgtttcacgttgtcacaggtgttgccagtaaccgggttggattcgcccataccacgtgcggagatcttgtctgccgggatacctttggagatcaggtaatcaacaacagactgagcacggcgctcggacagaccctggttgtaagcgtcagaaccgatgcggtcggtgtaacccagaacaactacggaaccgtctttcggatccaggttgctcagctggctgtacagctgatccagagcagcctgaccttccggtttcagggttgctttgttgaagttgaacagaacgtcagacttcagagtgaagtgcttggtctgtacttccggtgccggagctggagccggagcaactactggagctgcttcgccctgaccgaaacggtaggaaacacccaggctcagcatgccgttgtccggacgagtgccgatggtgtgtgcgtcaccgatgttgttggtccactggtattccagacgggtagcgatttcaggagtgatcgcgtactcaacaccgccagcgaagaccggagaaacgccggtgtcgtggtttttaccataaacgttggatttagtgtctgcacgccataccatgccacccagacgagtgtagatgtccaggtcgtcagtgattgggtaacccagtttagcggtcagttgaacgccctgagctttgtatgcaccgttttcaacgctgcctttgtacggcatacgacctaaccagtcgtaacccatttcaaagccaacatacgggttaacctggtaaccaccaaaagcaccagcgcccagttggttttcatgggtcgggccattgttgttgatgaaaccagtgtcatggtactgggaccagcccagtttagcaccagtgtaccaggtgttatctttcggagcggcctgcgctacggtagcgaaaccagccagtgccactgcaatcgcgatagctgtctttttcattttttgcgcctcgttatcatccaaaatacgccatgaatatctccaacgagataacacggttaaatccttcaccgggggatctgctcaatattaactctaccgatatcttcggcttatgccgagcacccctggcgatgtaaagtctacaacgtagttgaaaacttacaagtgtgaactccgtcaggcatatgaaaaaaaagtcttgtataaggtatgtttaatcttttttgtcagcgacaatttacagaagagaatcgcggaaaccgcttcagacaagcctccgcaaggaaaattagtcacgactgaaagcattggctgggcgacaaaaaaagttccaggattaatcctaaatttacttaatgatacaaattagagtgaatttttagcccggaaagttgtctcgtggcgtgagaggatgcgcttaccggacgcataataaaccccatagcgttaccttcatttgccgcatcaacaagttcagcatgctcttcttcagtcaaatcatctgccaaccaaccgatcaccacactgtaattgcccgtgcgtaaagcgcgaaccattgactccacagtgtggcaaggggagagctggctaatctgcattactttcgttaagggtagcccagatgcctgaacccattcccgactcagtttttgttgcggtgttaaccagagttgccagcgcgattgctgaccgagttgctgtaacaatggcaacagtagaagttgcgtcatcatgggctgatcttcgcgatagacaacttcactgataagcccggctgtagtgttttccgtagagacacgcgcaattttacttgctgcggatgagaacgacgaagaacgatgtgcatagcctgaagtgtacataatcaatccagcccctgtgagttactgtatggatgtacagtacatccagtgacaacaaagatcaaccctattttcggaaagagcctcgcaaattttgtcgttggtgacgggaaaacataaattaatcttgccccttaagaataagttgcctattttcgtagttaacggatccgttaatgtgaatcattcttttatgttatgattttaaaaggaattttatgaaaagcctctcctataagcggatctataaatcacaagaatacctggcaacgttgggcacaattgaataccgatcattgtttggcagttacagcctgaccgttgacgacacggtgtttgcgatggtttctgatggtgagttgtatcttcgggcttgtgagcaaagtgcacagtactgtgtaaaacatccgcctgtctggctgacatataaaaagtgtggccgatccgttaccctcaattactatcgggttgatgaaagtctatggcgaaatcaactgaagctggtgcgtctgtcgaaatattctctcgatgcagcgctgaaagagaaaagcacgcgcaatacccgggaaagactgaaagatttgcccaatatgtcttttcatctggaagcgattctcggggaggtggggattaaggatgtacgggcgttacgtatacttggggcaaaaatgtgttggttgcgactgcggcagcaaaacagtctggtgacagaaaagattctgtttatgcttgaaggtgccattatcggcattcatgaagctgcgctcccggtggcacgccgccaggagcttgcagaatgggctgactctcttacgccgaaacaggagtttcctgcggaacttgagtaatctggcgttgcagacgaccaatctcaggcagtaatgcaatcaataatccaacttgttgtacgaccagaggttctttgctgtctgcccgtggttcaagttgctgcatccgctgtttcaggctagctaatgcctcattgacgcgttcttcatcagcaggttgatgatgtaacgcgtcatcaacatagcaaactgcgtcatcaagaaacgccagaatttcaggattagttaactgctcccggtgagcaccgagggctgagatatagctggtaaacgtatggttaaggcacagcaaccgaaacgcggcttcgcgaatttgcggggtaacgttcggctcgctggacatatttgataccaccgacgccagctcagcatcacggttgtgtgcatcgcggcgggcaatacgatacgccagacggttatcacgcccctgatggtattgctccagtatggcatcgagataccgacagttggcctctgtggcgcgttcgagcatgcgcggcagattgcgaaactgccagtcaggccagatgtagctcactgccgcccacgcaatggcacaaccaatcagcgtatcgattacgcgaggtaacgctacttcaaaaccttcacccagtaagttaaaacacagtagcaccaaaagtgtgatgaacatcgttgcatgagcgtattgcacgttacggaaggcaaaaaagagcacgccggtaataaccagcagcaccagctgcccttccagtgatggcacaaaccacagcacaggaatgccaatggcgatacctaccagcgtaccaataatccttaacttcaggcggtggcgcgtggcgttatagtttggctggcagacaaacaaacttgtcagcaagatccaatacccgtgatgcattccggttatctgaatgatggcgtagccgaagcacaacaccagcgacattcttaccgcatgacggaagagggcggattccggcgtgaagtgacggctaagacgcagccagatatcactcaacccgtgcgggctgtcatcagcgagctcattttcgtcattattatggggtagtgcctgggcctgttctgattcaattgttgccagttgggcatcaatggcgcgtaaattgttcagcaaaaatcccagtgttttgagtaaatcggcgggtgcgccgttatcgcgcatccgctccagcgcagcatcaatatgcgtaaaagcgcgctcaaaatgcggatcatgttgataaggctgacgcaacaaaatacagcgtgacagttgctggcacgcctggccctgcatcgacatcagccgctgaaaacggaacagcacgtcgctgtggcgaaaatgttcacgcaatgtttgatactgaatatgagaagagctggcacgctcgtgaatatcctgtgcgacaaagtaataatgcagcgtgcgacgcgttccccgttgaccacgatcgccacgtaagcgggtcagcagcgagagtttcgtctgattcaatgtcgccatcagcagaccgttggcgagagccaaatcgtacagcggtgcctggctttgatcttcaatatcaggatcaaacatgcgcgacttgagctcaagataacgcgccagttgttcatagcaacgcgccaggttgtcctgcagcgggcggaccgggaacagcagatgaccaataagtgtcaggacgttgtaccagacggcaccggccagcagatacatcggctgctgataccagtgctcatacagtgatgttcccaacatagtgtaaatggcgatcagcaatgcaccgaaggcaattgttgcatagcgttgacccagaccgccgagcaaaatgaagccgctggtagagagcgttaagccaatcgcaaatagccagggccagggaaacagcaattctactgaggccgaggcgataaaaaagcagaacagcgtaatgatgaggttacgcaaacgtcccgccagtcggtcatcgagatcggtcagcgccgctgccaccatccccagcgttagcggaatcgtcagttttacatcacccagccaccacggaaacgctgtggttccacaaagcgcaataaaaatacgcgcgtaatacagccaggcgctgttccaggtatagcgtttgagcaaaggacttagcataaaggccatattagtggattattcaaaacgacgacgtgcattggcttcacgcgcagcttgcgctgtttctaccgataccacgcgacgaccaaccggccatagtgcaatagcggcaattttaaagttcgcaatgccgacaggaatgccaatgattgaaatacattgtgcgatgcccgttgcaatgtgcatcaggcataaccaccagccaaagaaaatcagccagaaaatattcaataccgtaccgccagtattcagcagcacatttttgccagccgggttcagttcatcgacatgaatagcttcattgccataaggcaccagagacagtttagtgatctcccagcaggatcgtgtcagcggtaaggtaaaaatcagcacaatactgaccagagtcgccaacagccagcccagagtggtggcaaatccgccaagcacaaagttcagaatgttcaaaacggtacgcataaaacctcgctttactgtggttttcagtaatgggcggcaattgtaacgtttttttgggctggagcacgttttctctgacggttacactgataagaaataatttcgtgtggatctacagagtcatggaactgaaagcgacaacgcttggaaaacgtctggcacagcacccttacgatcgggcggtgatcctcaatgccgggattaaagtctccggcgatcgccacgaataccttattcctttcaatcaattactggcgattcactgtaagcgcggtctggtatggggcgagctggaatttgtactgccggacgaaaaagtggtgcgtctgcacggcaccgaatggggcgagacgcagcgtttttaccatcatcttgatgctcactggcggcggtggagtggcgagatgagcgaaattgcgtctggtgttttacgccagcaactggatttgattgccacgcgcactggggaaaataaatggctgacgcgtgagcaaacctctggcgtgcagcaacaaatccgccaggctttgtcggcgttgccgttgccggttaaccgactggaagaattcgataactgccgtgaggcgtggcgtaaatgtcaggcctggttgaaagatattgaaagcgctcggttgcagcataaccaggcgtataccgaagccatgcttaccgagtatgcggattttttccgccaggtcgagtcttcaccgctgaatccggcgcaggcccgggcagtcgttaatggcgagcattctctgttagtgctggcaggtgcaggaagcggaaaaacgtcggtgctggtggcccgtgcaggctggttgctggcgcgtggtgaagcgtcccctgagcaaattttattgctggcgtttggtcgcaaagccgctgaagagatggacgagcggattcgcgaacggctacataccgaagacattaccgcacgcacgtttcatgcgctggcgctgcatattattcagcagggcagcaaaaaagttccgatagtcagcaaactggaaaatgataccgctgcccgtcatgaactctttattgctgagtggcgcaagcaatgcagcgaaaagaaagcgcaggcgaagggctggcggcaatggctgacggaagaaatgcagtggtcagtgccagaaggtaacttctgggatgatgaaaaattacagcgtcgccttgcctctcgcctcgatcgctgggtaagtctgatgcggatgcacggtggtgcacaggcagaaatgattgccagtgcacccgaagagattcgcgatctgttcagtaaacgtatcaagttgatggccccgttattaaaagcctggaaaggtgcgctgaaggcagaaaacgctgtcgatttttcgggccttattcatcaggcgattgtgattctggagaaaggtcgctttatcagcccgtggaagcatattctggttgatgaatttcaggatatctcgccgcagcgggcagcgttgttagcggcattacgcaagcaaaacagtcagacgacgttgttcgctgttggtgatgactggcaggcgatttaccgattcagcggtgcgcaaatgtcgctcaccaccgctttccatgaaaactttggtgaaggcgaacgctgtgatttagacacgacttaccgttttaacagtcgtatcggtgaggtggcaaaccggtttattcagcagaacccaggccagctgaaaaagccgctaaacagcttaaccaatggagacaaaaaagccgtcacgttattggatgagagtcaacttgacgctttgctggataagctctctggttatgccaaaccggaagagcgcattctgatcctggcgcgttaccatcacatgaggcctgccagcctggaaaaagcggcaacacgctggccgaagttgcaaatcgactttatgaccattcatgccagcaaagggcaacaggcggattacgtcatcatcgttggcttgcaggagggaagtgatggttttccggctgcggcgcgggagtcgattatggaagaggcgctactgccaccggttgaggatttcccggacgctgaagaacggcggttaatgtacgtggcgctgacccgggcacgccatcgggtatgggcactgtttaacaaagagaatccctctccctttgtggaaatactgaaaaatctggatgtgccggtggcgagaaaaccgtaagaaacaggtggcgtttgccacctgtgcaatattacttcagacggtccgcgagataacgctgataatcggggatcagaatatcgaccgcgtcgttgaaatgcggcgactggattatgaagtctgccgttgccacgttggtggcgaccggaatgttccataccgtcgccagacgcagcaaggctttcacgtcaggatcgtgcggcacggcatttagtggatcccagaagaaaatcaatacatcaattttcccttctgagatcaatgcgccaacctgctggtcaccccccattgggccactcaacatcgcgttgacgttcatgccggtcgcgcgggaaattaagttaccggtagtgcctgttgcatacagtacgtgttgttccagtaacggttgatgccgttccacccagctcatcagcatttgtttgcagtgatcgtgtgccaccagcgcaatatgtttccgcgcaggtaaagtgcgagtcgtcagttccataatgtacatccgtagttaactttcctacagattactgtaagcacttatcgctgcaagataaagaccgaaaaagcctgcgcacaggcacaaaaatctcaggaagatggttgtttttccgcccactgcaggaaagtatttcgcgtttgtgggtcagccagtttaaaccaatacttcagccgttgttctgtgagcacctgagactgcggtggaatagcatccagctcggaaacacccgaaagcagcgtactgtcatctgccatcatcgtggcaaattgcggtagtgaagcgcgtttcgcggatttgttatagcgttcaacctcgacctcataatcaatcgtttttgccgttgaggtaatggcgagaatatccagctttaccggaatcggcgtcgcatcgccatccaacaattcaaggcgcggcgcggcatcaaaatggttagcttcccgctcattctccaggcgaggcaggcgaaaattgacctggttgatgagctgggtattaaaactgaccaccagcggtggggagatatacagccgttcttcactattggaaagatgaatcgtcttctcaacgcgaaacactaactgatgcggtccattatccagttcaatgctgtccgcaccgcgcagcagagagctggaaaccttcttgccgtcgagtaccagaagatcgacatcggttgaaagccgcagcgtggtggcaaaaacggataccggcaaacataatgcaatcaaggtggtcacgatgccggttttcataggtagctcctgtcaaaagaccgcccgaataataatgtgtcaaaatttttctttaatcatacttactaacatatagacatatttcccgcttttgctctcattcattcgtattagctgcatggttggcatgtcggctttgtcgtacactttgttaaacagtctggaggaaataatgaaagaaaccgatattgcaggcattttaacgtccactcacaccattgcgctggtgggggcaagcgacaaacccgatcgtcccagctatcgcgtgatgaaatatctactcgaccaggggtatcacgtcattccggtttcgccaaaagttgccggcaaaacgctgctgggccagaaggggtatggcacgctggcagacgttccggaaaaagtcgatatggtcgatgttttccgtaattcagaagcggcgtggggcgtggcacaggaagctattgccattggcgcgaaaactctctggatgcaactgggggtgattaatgagcaagcggcagtactggcacgggatgccgggttaaatgtggtgatggatcgctgcccggctattgagatccctcgcctgggcctggccaaataaaaaatccccggaaggcaaaaaccttccggggatttgttcagggattagttacgcagacgcggggcctggagttgtttgcggatggtctgcgccagctcatccatggatggctgttcaggatgttcatcctgcaattcgctacttagctgggcttcagccaggtaggtatgaaccggtaggccgttatcgtcctccatcactacgtgataccacggagcggcgcgaagctcgtcattcaccgccagctcatcaggcgacggttcagagagcgaataaaccgggtcgatatccacgaccactccgagataacctaacagggaatggcggacctgctggccgataccgaatttgctggcaatcatagtcacctcccgggaaatctttacctttgatataagggtaaaattccacatttcaagttacatgacgcgacaggcaaaccctttcagatatagcccttccggataggtagcgatcaccggatgatcggctgcctgacggaactgctctataaattgtacatcacgaccggcatcaattgcggcatccgcgatgattttctgaaataaatcgctggtcatcagaccggaacaggagaaagtcaggagaataccgccttcattcagcagctgaatcgccagcatgttgatgtctttataaccacgacacgcgcccatcaactggcttttattctcaacaaacttcggcgggtccatcacgataacgtcaaatttttcaccgcgatcgcgataagtacgcagcaatttaaagacatcatcacggacaaactcagccttgctcagatccagtttgttcagctcaacgttctgccgtgcaatatccagcgcttcctgggaggtatcaacgctgacaacctggctgcaaccgcccatcagtgccgatacggcgaaaccaccggtataggagaaacagttcagcacacgtttattttcaacgtagcggcgggtagccaggcggctatcacgctggtccaggtagtagcccgttttgtgtccgtgctgaatatccaccagcagtttcattccgtgttcttcaatcggcagcagggcaggtggcaactcgccggtgacggggccctgggtcagctccattccttcttttttacgtaccgcgacgtcgctgcgatcgtaaatcgaacattccgggtacagcgtttgcagggcactaattaatgccgcgcgctgatattctgccccagcactcagcagttgcagcaccagaaaattaccgaaacgatcgatagtaatacccggcaggccatcagattctccggcgattaaacgatagctgtcgaggccatctttttgcgccagccagtcacgccatttttgtgcttgttgcaaacggcgggaaaaaaaagcaatgtcgatagactcagacgggtcaaacgtccagacgcgcgcccggatttgcgaagctggcgaataagcgccgcgtgctaaccattttccctgatgatcaacaatatcgatggtttcaccgaggctggctttaccttccatgcgggcaacggccccggaaaagacccacggatggcgacgaagtaatgatttttcgcgccctttggctaacactaaacgtacactcataatttacttttctgtcgatgcaaagaaatgggcgtcattgtccggagttttccatggatttgcaacgcgtccattaaggataaggagagcagcaatgtcgaaagtctgcataattgcctgggtttacgggcgagttcagggcgtaggatttcgctacaccacacagtacgaagcgaaaagactgggtttaaccgggtacgccaaaaatcttgacgatggcagcgtggaagtggttgcttgcggtgaagaagggcaggtggaaaaattaatgcagtggttaaagagtggcggcccgcgttctgcgcgtgtagaacgggtgctcagcgagccgcatcatccctcgggggaattaaccgattttcgtatccgttaaatacattttaccggttttggcaggccagcaattttggtggcttgcttagccggacctttcggaaacagtcggtataaatagcggctgttacctttttcttcgccaaatttattcgccatcgcttttaccagcatacgaatcgccggagaagtattgaattccagatagaaatcacgcacaaaacgcaccacttcccagtgttccggtgacagcgaaatcccttcgttctctgcaatcaccacagccagcggctcactccactggctgctttctttgagatagccttcggtatccgtttctatctctttaccttcgaagatcagcataattattactaccttaatcagactggcggcagtgtaacaaaaaacaaagccccgcataaagcgaggctatgaaagtgttagcgggtgagattaatcgcggctagcgaagcccagaatgctcagcaggctgacgaagatgttgtacagcgaaacatacaggctaaccgtggcacgaatatagttcgtctcaccgccatgaatgatgttgctggtttcaaacaagatagcgccagaggagatcagaatgaagaccgcgctgatcgccagatgcagagcaggcagctgcaggaagatattcgcaaccataccaatcagcaccaccacaatacccgccatcagcataccgccgaggaacgacatatctttgcgggtggtcagcacatatgcagagcagcagaagaacactaacgccgttccgcccagtgccatagcgattacgtcacccattccggcagacagataggtgttcagaataggtccgaggatataacccagaaaaccggtaaaggcgaatgcggagataatcccggtcggcttattcgccgttttataggtcaggaacatcaaaccatacatacccaccagcgtcagaatcagacccggagatggcagcatcagcaccgtactggcagttgcggtaatcgccgaaaaggccagcgtcaggctcagcagaaaataggtattacgcagcaccttatgggtgctaagcagtgatgtacggtcatgtgaagaactaacaatacgatccattgagtcactctctatgacagatgtaattaattaagcagcataatgataatgcgtaagggcacccagaagttttacccatctttacgcatttgatctggaacaggtttaacagcggattatcaggtcattaagcaaatataacgccctgagaatttcgacaggcaaaagaaaaaggggttagcatttagctaaccccttatcttatttggcggaagcgcagagattcgaactctggaaccctttcgggtcgccggttttcaagaccggtgccttcaaccgctcggccacacttccggaatgacgcgcactataaacatcccgatgcggcgtgtaaacccctaatttgtttgtttgcctgaaaaacagccaaaagtgcattgatagcgtgaaataacagcagattgatcatttcatcaccatgaattccttctcttttactcgtttagcaaccggctaaacatccccaccgcccggccaaaagaaaaataggtccatttttatcgctaaaagataaatccacacagtttgtattgttttgtgcaaaagtttcactacgctttattaacaatactttctggcgacgtgcgccagtgcagaaggatgagctttcgttttcagcatctcacgtgaagcgatggtttgccttgctacagggacgtcgcttgccgaccataagcgcccggtgtcctgccggtgtcgcaaggaggagagacgtgcgatatgaataacgaggaaacattttaccaggccatgcggcgtcagggcgttacccggcgcagctttctcaaatattgtagtctggctgccacgtcgctgggattaggcgcgggaatggcaccaaagattgcctgggcgctggagaacaaaccgcgcattccggtggtatggatccacggtctggaatgcacctgctgtaccgaatcttttatccgctccgctcacccactggcgaaggacgtcatcctttccctgatttccctcgattacgacgatactttgatggctgccgccggaacccaggcggaagaagtctttgaagacatcatcacgcaatacaatggcaaatatatcctcgcagtagaaggtaatccgccgctgggcgagcaggggatgttctgtatcagcagcggtcgaccgtttattgagaaactcaaacgtgccgctgccggagccagcgcgattatcgcctggggaacctgcgcgtcctggggctgcgtgcaggccgcgcgacccaatccgacgcaggcaacgcctatcgacaaagtcatcaccgacaaacccattatcaaagtacctggctgcccgccgatcccggatgtgatgagcgccatcattacttacatggtgacctttgatcgcttgccagatgtcgacagaatgggccgtccgctgatgttctatggtcagcgaatccacgataaatgctatcgccgcgcccacttcgacgccggagagttcgtccagagttgggatgatgacgctgcccgcaaaggttactgcctgtacaaaatgggctgcaaagggcctaccacctataacgcctgttcctccacacgctggaatgatggcgtttctttcccaatccagtctggtcacggctgcctgggctgtgcggaaaatggtttctgggatcgcggttcgttctacagccgcgtggtcgatattccgcaaatgggtactcattccaccgccgataccgtcggtttaaccgcgcttggcgtggtggcagcggctgttggtgtgcacgcagtcgccagcgccgttgaccagcgcagacgtcataaccagcaacctacagaaaccgaacatcagccaggcaatgaggataaacaggcatgagcactcagtacgaaactcagggatacaccatcaataatgccggacgccgcctggtggtcgacccgattacgcgcatcgaaggccacatgcgctgcgaagtgaatattaacgatcagaatgtgatcaccaatgccgtctcctgcggcaccatgtttcgcgggctggagatcatcctacaagggcgcgacccgcgcgatgcgtgggcgttcgttgaacgtatctgcggcgtctgtactggcgtacacgccctggcttcggtttacgccatcgaagatgctatcggtattaaagtgccggacaacgccaatatcatccgcaacattatgctggcaacgctctggtgccacgatcatctggtgcacttctatcagcttgccgggatggactggatcgatgtgttagatgcgctgaaagccgacccgcggaaaacctccgaactggcgcaaagtctctcctcttggccgaaatcatcccctggctatttcttcgacgtacaaaaccgcctgaaaaaatttgttgaaggcgggcagttggggatcttccgcaatggctactgggggcacccgcagtacaaactgccgccagaagctaacctgatgggctttgcccactatctcgaagctctcgatttccagcgtgaaattgtcaaaatccacgcggtctttggcggtaaaaacccgcatccaaactggattgtcggcgggatgccttgcgccatcaacattgacgaaagcggcgcggtcggggcagtcaatatggaacgcctgaacctggtgcagtcaattatcacccgcacggcggacttcattaacaacgtgatgatccccgacgccttagccatcggtcagttcaacaaaccgtggagcgaaatcggcactggtctttctgataaatgcgttctcagctacggcgcattcccggatattgccaacgactttggcgagaaaagtctgctgatgcctggcggcgcggtgattaacggcgacttcaacaatgtgctgccagtggatttggttgatccgcagcaggtgcaggagtttgtcgaccacgcctggtatcgatatcccaacgatcaggtcgggcgtcatccgttcgatggcatcaccgacccgtggtacaaccccggcgatgtcaaaggcagcgataccaacattcagcagctgaatgaacaggaacgctactcgtggatcaaagcgccacgctggcgcggtaacgcgatggaagtggggccgctggcgcgcacgttaatcgcttatcacaaaggcgatgctgcgaccgttgagtcggtcgatcgcatgatgtcggcgttgaacctgccgctttccggtatccagtcaacgttaggccgcattttgtgccgcgcgcacgaagcgcagtgggccgcaggtaagttgcagtatttcttcgacaagctgatgaccaacctgaaaaacggcaatctcgccactgcttccacggaaaaatgggaacctgcaacctggccgacagagtgccgtggtgtcggttttaccgaagcgccgcgcggggcgttaggccactgggccgccattcgcgatggcaagattgatctctaccagtgcgtggtgccgaccacctggaacgccagcccgcgcgatcccaaagggcagattggcgcttatgaagcggcgctgatgaacaccaaaatggcgatccccgagcaaccgctggagatcctgcgtactctgcacagctttgacccgtgcctcgcctgttcaacacacgtgctgggcgacgacggtagcgagctgatctccgtgcaggtgcgttaacagcgaaggagaatcatcatgcaacagaaaagcgacaacgttgtcagccactatgtctttgaagcgccagtgcgcatctggcactggttgacggtgttatgcatggcggtgttgatggtcaccggatactttatcggcaagccgctaccttccgtcagcggcgaggcgacgtatctgttctatatgggctacatcaggttaattcacttcagcgccgggatggtttttaccgtggttttgctgatgcggatctactgggcttttgttggcaatcgatactcccgcgagctgtttatcgtgccggtatggcgtaaaagctggtggcagggcgtgtggtatgaaatccgctggtatctgtttctggcaaaacgtccgagtgccgatataggccataatcccatcgcccaggcggcgatgttcggctatttcctgatgtcggtctttatgatcatcactggttttgcgctgtacagcgaacacagccagtacgctatttttgcgccgttccgttatgtggtggaatttttctactggacgggtggcaactcaatggacattcacagctggcatcggctggggatgtggctgattggcgcgtttgtgatcggtcatgtctacatggcgctgcgtgaagacatcatgtccgacgacacggtgatctccaccatggtcaacggctaccgtagccacaaatttggcaaaataagtaacaaggagcgttcatgagcgagcaacgcgtggtggtcatggggctgggcaacctgctgtgggccgatgaaggcttcggcgtgcgggtggcggaacggctgtatgcccattaccactggcccgagtatgtggagattgtcgatggcggtactcagggactgaacttgctggggtatgtcgaaagcgccagccatctgttgattctcgatgccattgactacgggctggaacctggaacgctgcgaacctatgccggagaacgcattccggcttatctcagcgcgaagaaaatgagcctgcatcagaacagtttctccgaagtgttggcgctggcggatatccgcggacatctgccagcacatattgccctcgtcggtctgcaacccgcaatgctcgacgactacggcggtagcctgagcgaactggcacgggagcaactgcccgctgcggaacaggcggcgctggcgcagcttgctgcgtggggaattgtgccgcaaccggctaatgaatcgcgctgtctcaattatgactgtctgtcgatggaaaattacgaaggcgttcgcttgcgccagtaccggatgacacaggaggagcagggatgagcaacgacacgccatttgatgcgttgtggcaacgaatgctggcgcgcggctggacgccagtcagtgaatcccgtcttgacgactggcttacgcaagcgccagacggcgtggtgttattaagcagtgacccgaaacgcacgccagaggtcagcgataatccggtaatgattggcgaattactgcgcgagtttcccgactatacatggcaggtggcgattgctgaccttgagcagagcgaagccatcggcgatcgctttggcgtctttcgctttcctgccactttagtgtttaccggcggaaactatcgcggcgtgctgaatggtattcacccgtgggcggaactgataaacctgatgcgcgggcttgtcgaaccgcagcaggagcgtgcctcatgagcgaaacttttttccatctgctggggccaggaacgcaaccgaacgatgacagtttcagcatgaatccactgccgatcacctgtcaggtgaatgatgaaccgagtatggcggccctggagcaatgtgctcacagcccgcaggtgattgcgctgttaaacgagttacaacatcaactaagcgaacgccaaccgccgttgggcgaggtgctggcagtcgatctgttaaatctcaacgccgacgatcgtcactttatcaatacgcttctcggggaaggggaagtgtcagtgcgcattcagcaggctgacgacagtgaaagtgaaatacaggaggcgatcttctgcggattatggcgggtgcgcagacgtcgcggcgaaaagttgctggaggacaaactggaggctggctgcgcgccgctggcgttgtggcaggcggcaacgcaaaatctcttgccgacagattcgctgttaccgccgcccattgatggcctgatgaatggcctaccgttggcgcatgagttactggcacatgtacgtaaccccgacgcgcagccgcacagcattaatctgacgcaattacccatcagcgaggctgatcggctttttctctcacgtctctgtgggccgggaaatattcagattcgtaccattggctatggcgagagctatatcaacgccacggggttacgccatgtctggcatttacgctgtacggacaccttaaaaggcccgttactggaaagttatgaaatctgcccaataccggaagtggtgctggcagcgccagaagatttggtcgactctgcgcagcggcttagcgaggtatgtcagtggctggcggaagctgcaccgacgtaaaaagacggtaagtatcgctttcagtcttatgaatatcgcaatcggcgaatacctctggtcgtagagtttcaggataaagagggagatctaccattatcgggttatttttctctcttcgcctacaggagtgcgcatgtgggatgtcattgatttatcgcgctggcagtttgctctgaccgcgctgtatcactttttatttgtaccccttaccctggggctgatttttttgctggctattatggaaaccatttacgtggtcaccggcaaaacaatctaccgcgatatgacgcgcttctggggtaagctcttcggtatcaattttgctcttggcgtggctaccggcctgaccatggagtttcagtttggtactaactggtcattctattccaactatgtgggcgatatttttggcgcaccgctggcgatggaagcattaatggccttcttcctcgaatccacctttgtcgggctgttcttcttcggctggcaacggctgaataaataccagcacctgctggtgacgtggctggtggcgttcggttcaaatctctctgcgttgtggatattgaatgccaacggttggatgcaatacccgaccggtgcgcattttgatatcgacaccctgcgtatggagatgaccagcttcagcgagctggtctttaatccggtcagccaggtgaaatttgtgcacaccgtaatggcgggctacgtgaccggggccatgtttattatggcgatcagcgcctggtatttactgcgcggacgggagcgcaatgtcgcattacgctcgtttgccatcggttccgtcttcggtactctggcgattatcggtaccctgcaactcggagacagttctgcgtatgaagtcgcgcaagtacaaccggtaaaactggcggcgatggaaggggagtggcaaacggaacctgcacctgcaccgttccatgtggttgcctggccggaacaggatcaagagcgtaacgcctttgccctcaaaattcccgcgctgctagggatcctcgccactcactcattagataaacccgtgccgggtctgaagaatttgatggctgaaacctacccacgcttgcaacgcggacgtatggcctggctgttaatgcaggaaatatcgcaaggcaatcgtgagccgcatgtgttgcaggcattccggggactggaaggtgacctgggctacggcatgttgctctcccgctatgcgccggatatgaatcatgtcacagccgcacagtaccaggcggcgatgcgtggcgcgatacctcaggttgcgccggtattctggagtttccgcatcatggtgggctgtggttccctgctgctactggtgatgctgattgcgcttgtccagacgctgcgtggcaaaatcgaccagcatcgctgggtgctgaaaatggcgctctggagtttgccgttgccgtggattgcgattgaagccgggtggtttatgaccgagtttggtcgtcagccgtgggcgatacaggacatcttaccgacatactccgcgcactccgctttaaccacaggacaactggctttctcactgatcatgatcgtagggctttacaccctgttcttaatcgccgaagtctacctgatgcagaaatatgcccgtctggggccgagcgcgatgcagagtgaacaaccgacgcagcaacaggggtaaaggagaaaatcatgtttgattatgaaacattgcgcttcatctggtggctgctgattggcgtgatcctggtggtctttatgatctccgacggatttgacatggggatcggctgtctgctgccgctggtggcgcgtaatgatgatgaacgccggatagtgataaacagcgttggtgcacactgggaaggcaaccaggtctggttgatcctcgctggtggggcattatttgccgcctggcccagagtgtatgcagcggcgttttccggcttttatgtggcgatgatcctggtgctgtgctcactgttcttccgcccgctggcctttgattatcgcggaaaaatcgccgatgcacgctggcgtaaaatgtgggacgccggtctggtcatcggcagtctggtgccgccggtagtcttcggtatcgccttcggcaacttgttgctcggcgtgccgtttgccttcacaccgcaattacgcgtggagtatctcggcagcttctggcaactgctgacgccattccctttattgtgcggattgctcagccttgggatggtgattttgcaaggtggcgtctggttacaactgaaaactgttggtgtgattcatctgcgttcacagctggcgaccaaacgcgctgcactgttggtgatgctgtgctttttgctggcgggttactggctgtgggtcggtattgatggctttgtactgctcgcccaggatgctaacggtccttccaatccgttaatgaaactggtggcagtgctacctggtgcctggatgaataattttgtcgagtcgcccgttttgtggatcttcccgctgctgggattcttctgcccattgctgacggtgatggcgatttatcgtggtcgcccgggttggggatttttgatggcatcattgatgcaatttggcgtgattttcacggcaggcatcacgctgttcccctttgtcatgccgtcaagcgtgagtccgatctccagcctgacgttgtgggacagtacttccagtcagctgacgctgagcattatgttggtaatcgtgctgatatttttgcccattgtgttgctctacactctctggagctactacaaaatgtgggggcgcatgacaacagaaactctccgccgtaacgaaaacgagttgtactaaggagcagaaacaatgtggtatttactttggttcgtcggcattttgttgatgtgttcgctctccacccttgtgttggtatggctggacccgcgtctgaaaagttaacgaacgtaggcctgatgcggcgcattagcatcgcatcaggcaatcaataatgtcagatatgaaaagcggaaacatatcgatgaaagcgatcttaatcccatttttatctcttctgattccgttaaccccgcaatctgcattcgctcagagtgagccggagctgaagctggaaagtgtggtgattgtcagtcgtcatggtgtgcgtgctccaaccaaggccacgcaactgatgcaggatgtcaccccagacgcatggccaacctggccggtaaaactgggttggctgacaccgcgcggtggtgagctaatcgcctatctcggacattaccaacgccagcgtctggtagccgacggattgctggcgaaaaagggctgcccgcagtctggtcaggtcgcgattattgctgatgtcgacgagcgtacccgtaaaacaggcgaagccttcgccgccgggctggcacctgactgtgcaataaccgtacatacccaggcagatacgtccagtcccgatccgttatttaatcctctaaaaactggcgtttgccaactggataacgcgaacgtgactgacgcgatcctcagcagggcaggagggtcaattgctgactttaccgggcatcggcaaacggcgtttcgcgaactggaacgggtgcttaattttccgcaatcaaacttgtgccttaaacgtgagaaacaggacgaaagctgttcattaacgcaggcattaccatcggaactcaaggtgagcgccgacaatgtctcattaaccggtgcggtaagcctcgcatcaatgctgacggagatatttctcctgcaacaagcacagggaatgccggagccggggtggggaaggatcaccgattcacaccagtggaacaccttgctaagtttgcataacgcgcaattttatttgctacaacgcacgccagaggttgcccgcagccgcgccaccccgttattagatttgatcaagacagcgttgacgccccatccaccgcaaaaacaggcgtatggtgtgacattacccacttcagtgctgtttatcgccggacacgatactaatctggcaaatctcggcggcgcactggagctcaactggacgcttcccggtcagccggataacacgccgccaggtggtgaactggtgtttgaacgctggcgtcggctaagcgataacagccagtggattcaggtttcgctggtcttccagactttacagcagatgcgtgataaaacgccgctgtcattaaatacgccgcccggagaggtgaaactgaccctggcaggatgtgaagagcgaaatgcgcagggcatgtgttcgttggcaggttttacgcaaatcgtgaatgaagcacgcataccggcgtgcagtttgtaatgcataaaaaagagcattcagttacctgaatgctctgaggctgatgacaaacgaagaactgtctaatgcgtagaccggaaaaggcgttcacgccgcatccggccactttcagttttactctttctcggagtaactataaccgtaatagttatagccgtaactgtaagcggtgctggcgcgtttaatcacaccattgaggatagcgcctttaatattgacgcctgcctgttccagacgctgcattgacaaactcacctctttggcggtgttcaagccaaaacgcgcaaccagcaggctggtgccaacagaacgccccacgaccgcggcatcactcaccgccagcatcggcggcgtatcgacaatcaccagatcgtaatggtcgttcgcccattccagtaattgacgcatccgatcgcgcatcagcagttcagacgggttaggtggcacctgaccgcgagtaatcacatcaaagcctcctttgccaaaatgctggatcactttgttgagctcatctttacctgccagatattccgacaagccatgttcattactcacggtaaacaggttatgcgaataaccacggcgtaagtcggcatcaataaataacactttttgatcggactgggcgatcaccgctgccagagttgaactgacaaacgttttaccactgtctggcgtcgcaccggtgatcattagaatgttattctccgtctccatcatagcgaaatgcagactggttcgtagcgcacgtacggcttccacagcagaatccgccgggttatccaccgccaggaaggggatatttttagtacgatggcgctgctgattagaaaataaatttttcttacgcagacgggtgcgtttatccagccactcggacattgggatagtggcataaacgctgatgccgtgctcttccagttgttccggggcttctacaccacgacgcaacatcgcacgcgccagcacggcacccacagaaataaacaggccaagaataaaaccaagcaccacgttcaacgcttttttcggtttcactggctgcggctgagtgactgccgggtcgataatccgcacgttaccaatggcactggatttcgaaatactcaactcctgctggcggttaagtaattgcagatataccgcacggcccgcttctacgtcacgacttaaacgcaacacttcctgttgggtggaaggcattgccgatacccgcttattcaggcgtttgcgttcttgctccagcgtctggcgtttttccagcagcgcacgataagttgggtgatctttcttatacagctgggagatctctgcctcgcggaaggtcagctcattgagttgattatcaacgttcacaatctgctcaagaacggctttggcttccaggttaaggtcaaccgaatcgcgctgctggcgataaacgttgagtttttcttccgcttggtccagctcgctgcgcacttcaggtaactggcgctgtaagaattcaaggctttgtgaatcctgcgccgcctggcgagcgatattctgttgcaaatagttgttagcgatgctgttcagaatacgagtaatcaactggggatcatcaccagtcatggtaagttccagcatcccgctttctttactgcgttcgctaacggtaaaggtttcctgcaatgcgttaatcgcttccagttcggtacgctggctcaggacaaactgtgttcctggtttggccttaatgtccgcgatagtcagcgcaacgccatctttttccagacgctggccgaccataccattgacggtgaactcttcaccttccagtgtatagtggccgttttccccaaccgtgagtgtcagttgctgatcctgaccattcagttgtggaatatgcatccagctgatcgccagctcacctggtttttctttggttaatctcgcccagccgcgacccacaatcggaaaatacttctgctcaactatgtcgcgcagattcagttcagcaatggttttaccgagaatcatgcgcgattgcagcagttggatctccggtgcagactcgggcgatgagttagggatcatatcgctcaggccgctgagaatggcgttgccctgtttttgctcaacctggaccagagtatctgcctgataaattggtgtgcttaacagcgagtaagcgacagcgatcagcgtgaataacgcggtcacgctgataataaacttacggtgatcccataactcgccgaccagacgaagcagatcgatctcattttcctgagtgctgcctggtggcgtattcatatttttagttgtcatcgtattttataaactcaaattaccggctgaggcgcttcgcccattcctgactggcgcgctccaacataccgtagacatgttcaaatgcgtcctgacttttacgatagggatccgggatctctttctgttccagccattgcccaaacagcattgtcttcccgcggacctcgggagcaattgcggtaacctgagcaatatgttccgactccattgccagaatcagatcgtaatttcgtgccatctcagcagtgagcttacgtccggcatgtccttcaagagatacgccatgattagcggcaacatctgccgctgtcgcatctgcagggtgttttaccagaccatgaacacctgccgatttgacttttacgcccggcagacgtttacgcagcaagcgctcgccaatgggcgaacggcaaatgttgccggtacaaaccaccaggattgagttaaattttagttgggccatgtttgaatccaccgtgaagtctctgtcaggtcatgcaccccggaaatcgtcggtaccagcagagaaatcacacggttccaacgagccagcggcgcggtagtgacataaacaatgtcgtaaggttcaagctggaattccgttccgagtatcattgccgatgcgtccttcgcattcagctgataaatattggcgattttgccattctgcttgttttgcgttgcacgaataacaaaaatccccgtcgcatcagcgacatcctgattcataccctcagcgttacccagcgcttccgccagggtcataccgctgcggtccattttcagcgtgctctgtttacccacttcacccatcacgaagactttcagatcatcgttgcgcggaataaataaaatatcgcccgggtgcagcagtttgttctggcgcaagtcgccacgctgcatcagcgcatagaggttcactttggtctttacgccattctgggtgagcaccacgttgcgccagtctgcatctgcggtcagaccgcccgcggcgttaatcgcatccatgatggtcagaggaatattggtaatcggctgctgacccgatttgctgacttcgccggtgacgtacgctttttgcgatcggaacgccgcgacgctgacatcgacttgcgggctttcaatgactgaatcgagacgcgctgtaatctcgttgcgtacctgggtaagtgttttcccggccactttcaggcgaccaatataggggtagaaaatcgcaccatcggcgttaacccagttgccggtatcactggcgctacggtattgccctgcgggggtggttagttccgggtgatcccagaccgtaaccatcaacacatcaccaatcccgatacgatattcatagtttgcgatttgctgctccagctccgggttagcctgcgacataatcggtttggcgcgcaactgatcaatcaatcctggcgtgacgggatagatattgaccattttgtccaggtcatactgattgtcaggtagttcaatgacatccttgttactggtcgataaattctgaccaggaacaagggtacatgctgtcaaagacagaacagccaatgtcagtaccgaaaacttaaaaatgttctttttcattggtttatatttatcagtcaatgtaatgttatgaattacgtcaggttattgtccaaccggtacttctcgctctgccgtcattggatagagctggtatttgcgtgacagcatttgtccaccatcacgcgtcaatggtgtccacgaaaccaccgcgcggttgcggttaggtccaatggtcatcaagtcgaatggaatcgagatataaaaacctttactaaagccgccttcgccgtagtcatctttagatacgttactgattgccgcccatacccctaccgccacgccgctgtcaaagcgtttggcgacgtcgatcgttgcgcctttatcttttgccagatattgcccaacgctaagtttcatcagtacgccattgagcgtcggcgggttccagtaagccgtcacgaaacctgttggcgtggaataatcggtgaaacgcatcatgttgtcccagtcacgttgcttcacgtagttaacgtccacacccagcgcccagcaggcatctagcgggcgataaagcagctcggaaccgacaccggcgtacatcgtttccagataaccgccatacacctggccatagaaaccattgcctaagtcagcaaaatagttcgcctgcaagttgttgagataaacgtcattgcgaacgtagtcacggatatgcgtgcgcacgcggggcagggtagagtccgcgggcaacagcgaagacttaaacttgtcgtagttgttgtaaatattggtgaaaataccgccatcaagcagcaggtggtcggtaaaccagtagcgggcactggacatcagccccagctggaacatatagaaatcttccgggccgcccagcgactgtgaaagtgttgggttgaaagagtagctaaagcgatcttcacgaatacggtagccccgaccaaaggcagaaagatcttcagcttcaacacgttgttgttgcagtggctctgattgaccaggcgctgtacctgccagctgtttgcgcaggctggctacgtcggtttcggtagtcaccatcgccatatgctcgcgcttttgcgtcacgctaatcttctcaacgccttgcggcaggttattcaccagaatccggttggcacgatcgaccgcttcacgagagtcacggtatttgtattgctgaccagacatatacagtgtcttatcgcgtagctgaatttctggcgcgtcaaagcccgcgttatacttcagggcggtaagttggtttgctaccgtggtgtactgcaatccttcagattcaggcgcaggttgatatgccggttttggcgtatcgcgcagggcagggcgcagatcgttgaaattggtccgtaacgtgaagccaaacatcaacgtgttaccgcgttcataactcaggttgagatctgcccagctggcagcgcgataaactgcgccgacgttgaaatggcttgcctgaggcagtttgccagcgaaatcattctggtaattgtttccatcgtattcgagtttcagacgcaggggattccacggcgtttgatactcaatgccgccaaagatggaagccgggccacgaaagatatcgctaaagctgatatcgcccgcatcgtgagactctgcgcgatgacaatatttatcgctcacccggcaaaacgggttggtaatattgcccgcattaccggcgtagccccatgccatcccgagggtgaaatcaaatggccccgcttgcttgctggccaccagatactcaccgtcaaacagacccgtaccagcaatatcacgtttaccaaacgccacttgcggtagccagtaaccttcttcccacaggcgaagtttaaaatcgaatgatttgtctttgtatgactgatcgccgctgaaatcttcccactggctatatttgcgtgtgcgcacatccgtataacgaatggtgccttccagccatgggaacagcgccacggaggtggagtagaaccggtattgatcgttatcccggtagttgacgctgaattcaccttccggtgcgatgcgcgcatttggcatctgcaacaatcctgtgccgccaaagtctgattgcgacgaacccagcggatccgggtaggttaatacttcagcatgacaggcactggagacggcaatggccaggcagcttaaaagataagaattcttcttcatcagtcaggaacacgttgcgttaaaacagacacaatctggtcatttaaatcagcatatttttcgggcagtacatgcgcagaaaagcccaaccaaagctggctgccaggcggtggttccacatgtcttttattccacagggcaacaggggcgacgacagtctcaccctcaggcgtaatcaccataacgttattcttgtccgcgcctgcaaggcgggggtgatcttgcagataatcggtaacgctacggcctgcctgccagggcaattgcccggccccagaaaccgcacccagcagagtaatagtcaccggacgctgtacggtatagagcgtatagtccccgaccaacgggggattgctgttctcatccactcgtacaaaatcagggtccagtttgaccggtaagcgaccagtgatattgagattgagtaactgctggcgcacggatttaatcgttgccgccacatcgtcgtcagcttctgcttcccaggaagcaagctgtgccatgacatgttggtagtctttaagcgctttagctttcgccgcagagtcggtcagcaaggcaccaggccaccagaggcgatcgcgcagttgcggttgtgtcaccaactggacaacattttccacggggccaacggaaagtgtctgttgttcgccaggcagataaatagtcaccgttccttgcgcaaaggcatggggtgtcattacgtaaagtacgctggcaatgaaatacgactgtaatttattcatggtgcgggtttaagaaacgtcatttctacgggaataacccctgcgcctaacatttgccgactttgacgaacctggccagtagccgaatcgacccagaatgtgttttgccactgtttttctggccgcgtggaagtcacctcttcctgccagacattacacagcacattgcgacccgcaatattcagcgtctctaatccagcaaaggaaaaagtagaactcagggtcgcagagcgaaaatggttgtcttcactccagagaatatcgcgcgtccagcggctgccatcttttattgccagcgcgttacgcagagggtcctgcccggaatttgtcacttccagcagattattattaagtttgacggtttttaaaagacgtccattgtgggtaaccagcatggcgttatcctgggataaccatttgctttgttcttgttctatatatcccagtaccacaaagattcgttgcccttcattaaggcgtaaatacatagtggaataaggcaacgcctggatctgctgatccgctacggtgatatcctgattatcgaaaaggctggcgcgaaatgtatcgaccatactttgctggctgtgcgtacatcccgcaagaaatagtgcgaaaatcgataaaataagagggcgcacctttaatccttgaaaggttaattaaaaaaatgcaaatctctaaagcccggtacgaatatcgcaaccgggtatcatttaactttaatttcgacgcgttaaagcagtattagcgtgtagtggacgtggtggttgaggtgttatgagaaccgccatcgccactgtcatttgctgcaacaactgccaacgtcgccacaccaacagccgttgccacaccgacaactgtcgccgtgccgacagcgccagcagccacgccaccagtggtagtagcagtcgtggttgcgccggtagtggtcgttgtggtgccagtagtacccgtcgttgcctcggtcccgtttgttgcttcaggggcagcaaacgcagctggcgtcgtcaacatgaaggccataaggattgcagaaagcttgtgtttcataacttttcctttattcatcgcatggacaatacgggtgatgctgccaacttactgatttagtgtatgatggtgtttttgaggttctccagtggcttctgtttctatcagctgtccctcctgttcagctactgacggggtggtgcgtaacggcaaaagcactgccggacatcagcgctatctctgctctcactgccgtaaaacatggcaactgcagttcacttacaccgcttctcaacccggtacgcaccagaaaatcattgatatggccatgaatggcgttggatgccgggcaacagcccgcattatgggcgttggcctcaacacgattttccgccatttaaaaaactcaggccgcagtcggtaacctcgcgcatacagccgggcagtgacgtcatcgtctgcgcggaaatggacgaacagtggggatacgtcggggctaaatcgcgccagcgctggctgttttacgcgtatgacaggctccggaagacggttgttgcgcacgtattcggtgaacgcactatggcgacgctggggcgtcttatgagcctgctgtcaccctttgacgtggtgatatggatgacggatggctggccgctgtatgaatcccgcctgaagggaaagctgcacgtaatcagcaagcgatatacgcagcgaattgagcggtataacctgaatctgaggcagcacctggcacggctgggacggaagtcgctgtcgttctcaaaatcggtggagctgcatgacaaagtcatcgggcattatctgaacataaaacactatcaataagttggagtcattaccgacaatacgtacgcttgagatcaggattgtctactttgagtataacatccttgtgaaatctccctttcctcataccgcttgcactatatactgcgggtaggaaaggcgcgcagagggaaatataagattgttaactatccccctctggaaatacgacttgtgagcataagataaatcttagcaaaatacaaattaaagataaggaaattgttacgaaagctattaattattgttggtaatatagtttcaagtggtactataactggctgttaaatggcatttataactattaggtgcagagatattcgcttaaatggattagtttctttgtggaaaagtaactgatgttataatgtatgatgttgactatttcactattccaataaaaccagtcagctttaaacaagcagcgtcatattaagagagataaacatttgccgctgttggtcctcgcaggccatttacgcggcaaaattccacacgtaatcctggtataagcacttctgcgtcgcggggagtgaatgcggaaatatggacctgaacttctttacgaccgtcggaggggataatgaatcctttgccgcttttgcgatcaaaggttttgacaattcctgtcattttacgggacaaacaaattccttactgaaaatactgcgctgcactatacggggttaataaaataaagccagcgatatttaagaccgccggacggctaaaataaaatttgcttaatctcaattatcatgcgttaatagctgcgtcggtttgaaagacagacagcatacaaagtagtttactaaagcagttctcattatcaggcattatccccttcttttgagtctctctcctgaacactaagtagtttctgtattaaagccctgtttgccgaaaggcccaaaatgaaggaagtaaaatatgtctaataaaatgactggtttagtaaaatggtttaacgcagataaaggttttggctttatcactcctgatgatggcagcaaagacgttttcgtccatttcaccgccatccagagcaatgaattccgcacgctgaacgaaaatcagaaagttgaattttctattgagcaggggcaacgtggccccgcggcagcgaacgttgttacgctctaaggttgccattattactcaacatctccatttccgctgtccatgttgtcatggttcacagtaccgcacatcggcattcgatgtgacggagcgaaaccctttgggcgctaagtgtattttttgtaaatcgacgatgatcacctttgataacgtcgcgctgcaaatacgcactgaccatgcgccgctggatttcacaaaataatatcaggctccctcgtggagccttttttatatctgccttatttttcttcaacgctgtatgtatagtaagcgataacctgttgattattgaatctttcggggagatggcttataacatttcttacctgaccagggtaccgggaaccaacaccttactggcgtgttgctgtcttttaagaccagaagaggttaacagtgaatattgaagagttaaaaaaacaagccgaaacggaaatcgccgactttatcgcgcaaaaaatcgccgagctgaacaagaatacagggaaagaagtctctgaaattcgcttcaccgcacgagaaaaaatgaccgggcttgaaagttatgatgtcaaaatcaaaataatgtgattttgtgaacatcaccccgtgcgaggtgatgttccgcttgttgctaatttagtgaccaatcattggcgcttgtggaattaagcgtcggtacaattcctccggcaccgggctttgccatactcccgcatacattgcgtaaccaatcaccgcaaacataatccccagaaccagtagcgtcattaaccagccagacaacgcaaaggcttttttatttgccgcaggtttttgcagtgaaaaggtcaatgttgaggctaccggacatgactctacgcaagtcatacagccggtacattccactgttcgtacctgaattaatttatcgaccgggatccgtgatgggcaattttttgcgcatttgccacagtcgatacaactttcggcattgcgacgaatcttaaacggcgacaatagcgaaaccacgcccatcagcgcgccatatgggcaaagataacgacaccaggcatggcgaataaacaggctggcaatcagcaaaacggtcacgctgattaatgtcgcggtccccatatgacgaaagaaatcgagcattttaacgtccatcaccacgctgtagggcgacaacataaaatagtgaatcgcctgagcgggcatcaataacgcgatatagataaaaaaactcaacagcaaatacttcacgccgcgcagaggaatatccagccagcggggaaggacacattgccgaccaaacagtttgttaccgagatcgccgattaattcagaaagcgtaccaaccgggcataaccatgagcaaaaggcctttttgagtaatagactgatgacgataaaagcgaccaataacagcatcgcggcggcgtggacggacggtaactgacctgttacaaggctatatttcagattcatcagcccggcaatcggtagccagccttcgatacctcccggtctggcgacaaatgtcgtgctacttgccgtttcgtaatagcgcacccaataccagaacgtgatggcaatataaatattcattgccaacagtaataattgcgtcgctttacgccaggtcgtggcattacgccagtcattccacggtaatttgccgcccgtcgtgcctggccgccgctgccagcgggttcttttattctctgccatgattttgccagtccgttaagttgtataccaaatgccactattctagttgttcttaactggctgatattgattcaaatcgcgttcaggtctttcttatgcaaccatgcttccagagcggcaacactgcgtgtaatttcttcgtgtggaaggggggcagataatggctgctgctccagttgtgcgcatagctggctggcgatatgcattcccagactcgagcaactgctttttagctgatgcgcggcacgctttattttctcgctatcctgactggcgcgggcaatgtcgatttcatcgagaagcggcagggcatgttgtgtaaataataccagccattcgtggatcttctccgtccccattaactgagcatcttcattgagttgcgatacatccagcgattgatcattattgacttgcagttggagatagtgcgccagtaactgaccgagcacttcacgcggcaccggtttagggataatcccgcggaataatgaactggtacgctggcgcagcgtttcgtcaatgacatgggcgctaaagccaatcaaaaccagcgacggatattgctgtgccagttgtcgggcaagcgtaatgccgtcgatatccggcagatcaaaatccaccagtgcggcagcaaacggttcgctattttgcagtgtctctaaagcctgcgcggcattgccaacagcaacaatctgcgcaccactggttttcagcatctcaatggtaattcgctgggttagcgggttatcttcaattaacagcaaacgtaaaccgtcaagacgcaccgcctgattgactgtttttggcacgggtgccgtggcaacacgtaacggcaagcgtaaacaaaaacagcttccaacctccggcgtgctggtggcgctcagttcgccgcccatcgcctgggccagacggctactgatagtcagtcccagcccggtgccgccgcgtttgccgcttacctgcacaaatggctggaagatttctgccagtttcgcgggatcaataccgcagccgctgtcttccacttcgaccagccattgctcgccatcagtgcgactacgcaggataatgtacccttcgtcagtaaaacgcagggcgttgctcaacaggttggttataacctgacgaatacgtcgtggatcgcccattaacgcgcacggcatatcatcggcaattgccgttgccaggcgaatcgggcgacctttcacccgtccgctcattaattgcagggtactttccagcagcgggcgcggttcaaagggctcatcgctgaccgaaacattcttgccacctgcttcgatagcggaataatcgagaatatcgttgaggatggtcagcaacgattcaccagagtcagtaattgcccgcaaatcatcacgctgggcgttaagtgcggggttatctgccagcagttgagcagtgccgagaataccgtacagcggtgtgcggatctcatggctcatcgccgccagaaacgccgattttgcctggctggctttttctgcttccgcccgtgcctgtcggtgttctatcaccagttcctgcaattcagctgtacgcgctttgacctgcgccgccagctgttcgcggtggcgattcagtgcatgaacattgctgcgaaacgcatccatcagccgcccgatggtatccagctcccgtacgccagcggtttccgggaaaggggagtcaatatcaccgtccagcagccgttgcagcgcctgcgtttgttcggcaagtggacgcgtgactgagcgataaaccacgcgccagaggatcagaatcagtgcgcaaagtgaaaccatccccagcaataacaggctgtattgcccgcgtgcactcgctttttccagatgcgccagtccgtgctgattacgcagctcaatggtgtcgaccagctgactgacttcgctactaaactgcgcgaactgggcgatgttattttgtgcgagagtttgtaggtgattgctgatttcactgtcctgctgatacagcgccagcaaatcgctatattggctaacggtagttaacgttgttgcgacctgcgcacgaacacccggatcttcaatgcgtatttgccgacgttgcagaattttcaccgcattattgagctgcttttccagcgttggtgcatttttctggatctgctccagccccagattcatcaccatttgctgcacccgcagagcgctaaggcgcagttcattcatctggttaacatactcaagatcgatatcaatcagccgatcgagtgcactttcagcagcctgacgctgatcttgttcgatcaaatcgtaaatcccggcctgggtcgctccagcggaagttgtcgcattattcgcctgaccttgcgccaggcgtgcgatctcatcggcggcagcgactatctgctgactgagttgctgttgttgctggcgcagttgcaaacgctgccccaccagttccccttgctgacgtaacgaacgggagatctcctgctcctgttgttcaatagcggtggtatcaaaaccttgttcccgtaacgcttgcagcaacgcattaatcttcaggctttgtgcggtgagcattcgcccctgcgcctgccacatcttttcgttatcggcactggtcaggttctgcgcggcgaaaagttcccaggcgctggcttcgctcaactggcgcgccatattcatggtaggaatcaatgcctgagtgttgtctttttccacctggctgataaagcgcaggttgtaccatcccaccagggtactggtcagggttaacagcgccatcagggcaaagcccatccagagtcttcgggtcagggttaaattcacggtcggtgcactttaggtgaaaaaggttgagtcgcaaagcggaatgcatctagcataaagccttattattgatgaggctatcatgcgcgtactgctatttttacttctttcccttttcatgttgccggcattttcggctgataacctgttgcgctggcatgatgcgcagcatttcacggtgcaagcctctacgccgcttaaagccaaacgcgcatggaaactgtgcgcgctttatcccagcctgaaagattcatattggttatcgttgaactatggtatgcaggaggctgctcgccgctacggtgtggatttaaaagtgctggaggcaggcggctacagccagttggctacccagcaagcacaaatcgaccagtgtaaacagtggggcgcagaggccattttgctcggtagtagcacgacctcatttcccgacctgcaaaagcaggtagcaagtctgccggtgatcgaactggtaaatgctattgatgctccccaggtgaaaagccgcgttggtgtgccctggtttcagatgggctatcaaccggggcgatatctggtgcaatgggcgcacggtaaaccactgaatgtgctgttgatgcccggacccgataacgccgggggcagtaaggagatggtcgagggttttcgcgcagccattgccggaagcccggtgcgtattgttgatattgcgcttggtgataacgatattgaaatccagcgtaacctgttgcaggagatgctggaacgccatccagaaatcgacgtcgttgccggaacggccattgcggcagaggcggcaatgggggaagggcgtaacctgaaaacgccgcttaccgtggtgtcgttttatctttcacatcaggtgtatcgcgggctgaagcggggaagagtgattatggctgccagcgatcaaatggtctggcagggggaactggcggttgagcaggccatcaggcaattacaggggcaatcggtttctgataatgtcagcccaccgattttagttctgacgccgaaaaatgccgaccgtgaacatattcgccgctcgctgtcaccagggggatttcgtccggtctatttttatcagcacacatcagcggctaagaaataaccttcaccatgttgcgtcaccagtaaatccgcgctgagtttatgacgtaaacgacgaattaacacatcgacggtgcgcaggtcagggttttccacccgacgcgcagaaagcatacgtagcagacgttcacggctgagaatttcgcccggattcgtcacaaatgccaccaacatttcatactctgcgcgggtcagtttaatcggctcgccatcccgctccagcgtatggcgcgacacattcaggcaataaccggcaaagcgatagcagttgtcctgagtgtgcggttgagcttgtcgcgcgaggtcgattcgccagagcagatttttcacccgtactaccagttcgcgcagttccagcggtttggtgacgtaatcgtctgcgcccatttccagcccaacaatacggtcaatccgatcgctgcgtccggtaaccagaataatccccaccgttgagcgttctcgcagggcgcgggttaacatcaggccattttcatcgggtaagttgatatccagcagaattaaatctaccgactgattctgcataatttcccgtagcccagcaccgctcgccgtaacggaaacggtatacccctcctgagtgaagtaggattgtaatcgcgcctgggtaaccggctcatcttcaacaataacaatgtgatgtggcatcagagggttttactcattctgttcatatctgttcatattctgccgtaagccgttcatcctgaccagtgccgctgttcatatttgctcattaagatcgcttcactaaaccataattctacaggggttattatgcggaaactctggaacgcgctacgccgacccagtgctcgttggtcggtactggcgctggtcgcaattgggattgtgattggcattgcgctgattgtattgccacacgttgggatcaaagtcaccagcacaaccgaattttgtgtcagttgccacagtatgcaaccggtgtatgaagaatataaacagtcggtgcatttccagaacgcctccggcgtgcgagctgaatgccatgactgtcatatcccgccggatattccaggcatggtgaagcgcaaactggaagcgagcaatgatatctaccagacctttattgctcactccattgatacacctgaaaaattcgaagccaaacgcgcggaacttgccgagcgtgaatgggcgcgaatgaaagaaaacaactcggcaacctgccgctcctgccataactacgatgcgatggatcatgcgaagcagcatcctgaagcagcacgtcagatgaaggtggcagcgaaagataatcaatcctgcatcgactgtcataaaggtattgcccaccagttaccggatatgagtagcggcttccgtaagcagttcgatgagctgcgcgccagtgctaatgacagtggtgacacgctgtactctattgatattaagccaatttatgcggcgaaaggcgataaagaagcctctggttctctgctgcctgcttcggaagtgaaagtccttaaacgtgacggcgactggctgcaaattgaaattaccggctggacggaaagcgccggacgtcagcgtgtactcacccaattcccaggtaaacgcatctttgttgcctcgattcgtggtgatgtgcagcagcaggtaaaaacgctggagaaaaccaccgttgccgacaccaataccgagtggagcaagttgcaggccactgcgtggatgaagaaaggcgacatggtgaacgatatcaaaccgatctgggcttatgcggattcgttgtacaacggcacctgtaaccagtgccacggcgcaccggaaatcgcccactttgacgctaacggttggatcggcacgctcaacggcatgattggctttaccagtctcgataaacgtgaagaacgcaccttgttgaaatatctgcaaatgaatgcgtctgacaccgcaggtaaggctcacggcgataagaaggaagaaaaataatgaacaataacgatctctttcaggcatcacgtcggcgttttctggcacaactcggcggcttaaccgtcgccgggatgctggggccgtcattgttaacgccgcgacgtgcgactgcggcgcaagcggcgactgacgctgtcatctcgaaagagggcattcttaccgggtcgcactggggggctatccgcgcgacggtgaaggatggtcgctttgtggcggcaaaaccgttcgaactggataaatatccgtcgaaaatgattgccggattgccggatcacgtacacaacgcggcgcgtattcgttatccgatggtacgcgtggactggctgcgtaagcgccatctcagcgatacctcccagcgcggtgataaccgttttgtgcgcgtgagctgggatgaagccctcgacatgttctatgaagaactggaacgcgtgcagaaaactcacgggccgagtgccttgctgaccgccagtggttggcaatcgacggggatgttccataacgcttcggggatgctggcgaaagctattgccttgcatggtaatagcgttggtacgggcggagattactctaccggtgctgcgcaggtgatcctgccgcgcgtagtcggttcgatggaagtgtatgaacagcaaacctcctggccgctggtattgcagaacagcaaaaccattgtgctgtggggctccgatttgctgaaaaaccagcaagcgaactggtggtgcccggatcacgatgtttatgaatattacgcgcagctaaaagcgaaagtcgccgccggtgaaattgaggtcatcagcatcgatccggttgtcacatccacccatgagtatctggggcgcgagcatgtgaagcacattgcggttaacccgcaaactgacgtgccgctgcaactggcgctggcacatacgctgtacagtgaaaacctgtacgacaaaaacttccttgctaactactgtgtgggttttgagcagttcctgccgtatctgctgggtgagaaagacggtcagccgaaagatgccgcatgggctgaaaaactgaccggcattgatgccgaaaccattcgtgggctggcgcggcagatggcggcgaacagaacgcaaattattgctggctggtgcgtgcagcgtatgcagcacggtgaacagtgggcgtggatgattgtggttctggcggcgatgctggggcaaattggcctgccaggtggtggttttggttttggctggcactacaacggcgcaggcacgccggggcgtaaaggcgttattctgagtggtttctccggctctacgtcgattccgcctgttcacgacaacagtgactacaaaggctacagcagcactattccgattgcccgttttatcgatgcgatcctcgaaccggggaaagtgatcaactggaacggtaaatcggtaaaactgccgccgctgaaaatgtgtatttttgccggaactaacccattccatcgccatcagcagatcaaccgcattattgaaggcttgcgcaagctggaaacggttatcgccatagataaccagtggacctcaacctgccgctttgccgatatcgtactgcctgcgaccacgcagtttgagcgtaacgatctcgaccagtacggcaatcactccaaccgtggcattatcgccatgaaacaggtggtgccgccgcagttcgaggcgcgcaacgacttcgatattttccgcgagctgtgccgtcgctttaatcgcgaagaagcctttaccgaagggctggacgaaatgggctggctgaaacgcatctggcaggaaggtgtacagcaaggcaaaggacgcggcgttcatctgccagcgtttgatgacttctggaataacaaagagtacgtcgagtttgaccatccgcagatgtttgttcgccaccaggcattccgcgaagatccggatctcgaaccgctgggcacgccgagtggcctgattgagatctactcgaaaactatcgccgatatgaactacgacgattgtcaggggcatccgatgtggtttgagaaaatcgaacgctcccacggtgggcctggctcgcaaaagtatccgttgcatctgcaatctgtgcatccggatttccgacttcactcgcagttatgtgagtcggaaacgctgcgtcagcaatatacggtagcgggtaaagagccagtattcattaacccgcaggatgccagcgcgcgcggtattcgtaacggtgatgtggtacgcgtctttaacgctcgcggtcaggtgttggcaggggcagtggtttctgaccgctatgcacccggcgtggcacgaattcacgaaggggcatggtacgatccagataaaggcggcgagcctggtgcgctgtgcaaatacggtaaccccaacgtgttgaccatcgacatcggtacatcgcagctggcgcaggcgaccagtgcgcacactacgctggtggaaattgagaagtacaacggaacagtggagcaggtgacggcgtttaacggccccgtggagatggtggcgcagtgcgaatatgttcccgcgtcgcaggtgaaatcatgaccacgctgacagcacaacagattgcctgtgtttacgcctggctagcgcagttgttctcccgtgagctggacgatgaacaactgacgcaaatcgccagtgcgcagatggctgaatggttttcgttgctgaaaagcgaaccgccgctcactgcggcggtgaacgagctggaaaaccgtattgccacgctgacagtacgtgacgatgcccgtctggaactggccgcggacttttgcggcctgtttctgatgaccgacaaacaagcggcgctgccgtatgcatcggcctacaaacaggacgagcaagagattaaacgcttgttagttgaggcagggatggaaaccagcggcaatttcaacgaaccggcagatcatctggcgatctatctcgaattgctcagccatctgcatttttcgctgggagaggggaccgttcctgcgcgaagaatcgacagtttgcggcaaaaaacactgacggcgctgtggcaatggttaccagagtttgttgcgcgttgtcgtcagtatgacagctttggtttttacgcggcactaagccagttattgctggtgttagtggagtgcgaccaccaaaacagataacgtcgtttgtgcgcctgaaaagacgcgtttagcgtcgcatcaggcattatggcgcagttgccggatgcggcgtgaacgtcttatccggcccacaggaactgtaatctttgtagaccggttaagatgcgtcatcgcatccggcaaacacacatcacggatgagctacaaaccgggaaagccgctggcgcagcaggcggttttcctgcttcaggtgcgcaatatcatccattaacgtcagcgccaccgcgatccccggccagtccagagccagttcatgacgcaggcgtaccgcgcgttgcaccacaatggcggcatggtcgtcaaatacccaggttgtttcctggatctcacgcggttcaaccacccccaaaccgacaatttcattcaactcctcttcagagatgccggtatgcaggcaaaattcggtaatagtaaaagtcaccgtaacattagccattatgctttcccccaatctttacgtggatcaaaagacgactgggcgtctgccagttgctgccacagcgcggcagtgttttcatccggtttcggcggcatcacgattttcagtaccgcatacagatcgccggtctgttttttgctcaccagacctttgcctttaacgcgcaatcgttgcccggcctggctgcctggcgggatagtcagcaaaatgctttctttcagtgttggaacggtgactttagcacccagcgccgcttcccacgggctaaccggcaccacaatttccagatcctggccgacaatatcaaacagcggatgtggcgcaatatgaatcaccagccacaaatcgccatttggaccgccgttttcgcccggcgtcccctggcctttcagacggatgcgttgaccattgccgacgcccgccgggatcttcacattcagcgttttcggaatttcctgttcgatcatgccaaaggcgttataaaccggcaggttatagctgatggtacgcttatgctcagtaagcgtttcttcgaggaataccgccacttcgatttcaatatcgtggccgcgtgtggcggggcgttgacggctctggcgggcatgctgaccgaaaattgacgagaagatatcgtcaaaatcttcggcgttaaaactctgaccgtcgccatggtggaactgacggttaaattgcggatcgttgcgatgttgccacatctgatcatactcagcgcgacgttgttcatcacttaacacttcccaggcttcagcgacctctttgaagcgggcttcggcatccggttctttgctgacatcaggatggtatttgcgggcaagtcgacgataggcggtcttgattgtcttgagatcgtccgtcggtttcacgcccatgatggcgtaataatcctttaattccatagcgttatctcgcgtaaatcaacacaaattgaaggaacccctgtaaggtaactcctataagtgtagggtaatcctcaaaatttcatatgccaacacagaatatgttattgaaatcatcgcggagaggaggtcgccatcaagatgggttgctgaacatattttaaacaggtgaaaaagggtgagcgatttttgatagttgaaccaggcactttaagtttaactagggcgtcattatttattaaattttatagacgctatatatgggtagtaatatacatggaattagttgcactgcaaataattatttgaaacaggcctggaacgatataaaaaatgagtacgaaaaaaatcaaacatattcaatcacgctttttgaaaacacactggtgtgttttatgcggttatacaatgaactcagacgtaaagtaaatgaagaggatactccatgtctggaatgtgaatcactagaaaaagaatttgaggaaatgcagaatgataatgatctatcattatttatgagaatattgcgtactaatgatacacaaatttattcaggggtttcaggaggtattacatatactatacaatatgttcgagatattgatattgttagagtgtccttgccgggcagagcttcagagtctatcacagattttaaaggttattattggtataactttatggagtatattgaaaacattaatgcgtgtgatgatgttttttctgagtattgttttgatgatgaaaatataagtgtccagccagagcggataaatacgccgggaatatctgatttggattctgacattgatttgtctggtatatcttttattcagcgtgaaactaaccaggcattaggattaaaatatgctcctgtagatggcgatggatattgtctgttaagagctatactggttttaaaacaacatgattattcatgggcgctggtcagttataagatgcaaaaggaagtttacaacgaattcattaaaatggttgataaaaaaacgatcgaggctcttgttgatacggcattctataatctcagggaagatgtaaagacgttatttggcgttgatctacaatctgacaaccaaattcaggggcagagtagtcttatgtcatggagctttctgttttttaaaaaacaattcattgatagttgcttgaataacgaaaaatgtatcctgcatttacccgagtttatatttaatgataacaagaacttgcttgctttagataccgacacgtcggataggattaaagcggtgaagaattttcttgttgttctttcagatagcatttgctcattatttattgttaatagtaatgtggcatcaatctccttggggaatgaatccttttcaacagatgaagatcttgagtatggttatttaatgaacactggcaatcattatgacgtttacctccctcctgaactttttgctcaggcttacaagttaaacaataaggaaatgaatgcgcaactcgactatttaaatcgttatgcaatttaatggcaaaggcatatgctaaaaaccattgttattagtctcacacttttttattggtaaatattgtctctgtattggtaacgccgcagatattctgtttagccacaggtgcaattatcagcggcgtacgcgaggcaggggctaatcaggcatagtttgcgtcaaaccttgcctgtttttgaagatgtatatagaaaaacaggcgttcaacaagccattttgcgaacctgttcccggaaaaaagtcatatttctgtcacactctttagtgattgataacaaaagaggtgccaggaatgaacaaaacgctaatcgccgcagctgtggcagggatagttttactcgcttcaaacgctcaggcacaaaccgtaccggaaggctatcagctacagcaagtgctcatgatgagccgccataacttacgtgcgccgctggcgaacaatggcagtgtgctggagcagtcgacgccgaataaatggccagaatgggacgtccccggtgggcaactcaccaccaaaggtggcgtgctcgaagtgtatatgggccattacatgcgtgaatggctggcagagcaggggatggtgaaatcgggggaatgcccgccgccgtacaccgtttatgcctatgccaatagtctgcaacgtaccgttgcgaccgcacagttctttattaccggcgcattcccggggtgtgatattcctgtgcatcaccaggaaaaaatgggcactatggacccaacctttaacccggtgatcaccgatgattccgccgcattcagtgaacaggcggtggcggcaatggagaaagagctcagcaaactccagcttaccgacagctaccagctactggaaaaaatcgttaactataaagattcccctgcctgtaaagagaaacaacagtgttcgctggtggatggcaaaaatacctttagcgccaagtatcaacaagaaccaggtgtttccgggccgctgaaagtcggcaactcgctggtagatgcgtttactttgcaatattacgaaggttttccgatggatcaggtggcctggggagaaatcaaatctgaccagcagtggaaggtgttgtcgaagcttaaaaacggctaccaggacagcctgtttacctcaccggaagtggcgcgcaatgttgcgaaaccgctggtcagttatatcgacaaagctctggtcaccgatcgcaccagcgcaccgaaaattacagtgttggttgggcacgactccaacattgcctctctgttaacggcgctggatttcaaaccgtatcagttgcatgaccagaacgaacgcacgccgattggcggcaaaatcgttttccagcgttggcatgacagcaaagccaatcgcgatttgatgaaaattgaatatgtgtatcagagtgcggaacagttacgtaatgccgatgcgttaaccctgcaggcacctgcgcagcgtgtgacgctggaattaagcggttgcccgatagacgctgatggtttctgcccgatggataagtttgatagcgtgttgaatgaagcggtgaaataacagaaaactcccccgcgagaagcgggggagtcgctggttaaacgtttttacgttcgatggtctgttcgccccaaaaaagcgaatctttatcggtcttagcaaaggctttgactaacacttcatcactaccttcttcccaaatcttttccgccattttttcgtcgtacccggcgacttcgaaaatggcctcggctatttccggcgacgtattgcgcagagatgcccattcaccgacgtgatgagctttcgcttcttgagttggcatgcgtatcctcctgttgaagattagccgttaagtttaactgccagacctgcgacatattccccttgataacgagcaatagacagttcttcctggctgggctggcgtgaaccgtcaccgcctgcgatggtggttgcgccgtacggcgtaccgccgcgaacctgtgaaacgtcaaataattcctgcgctgcgtagccaatagggacaattaccatgccgtgatgcgcaagggtcgtccaggtggatgtgatggtttgttcctgaccgccgccagtaccggtggaactaaagacgctcgccagttttccgtatagtgcgccggaagcccacaggccgcccgtctggtcgaggaaggtacgcatttgaccggacatgttgccaaagcgggtaggtgtaccaaaaataatggcgtcgtaatcggccagttcttgcggggttgcaaccggtgcagtttgcgttttaccgcctgctttttcaaataattgcggcggcatggtttccggtacacgcttaacgacaacttcagcgccatccactttgcttgcaccctcagcgactgcgcgtgccatcgtttcaatatgtccgtacatggaataataaagcaccagaactttagccatttctaaccactcctcgtgttatctctattccgtagcgattcgctaccacttatttaaagataagacgtccttttcagagtgcaaatttcacaaccacttatttgatttataacaactttcacaagcacgtaattttgtcgcaaaatgacacatttttatctcatcgcgtttttttaatcataagagcggcttatggataattattggagatgatatctattctcgctaagaagctgttgcaggatattaccaaacgcgggtctgcccgcgtcagttcactaagcttagtcccacgtagcgaaaatatggcagccgccatacgccgcgttaattctatgcaatatgatgtctatacccagacggaggtcagtaatggcaaaccatcgaggcggttccggcaattttgcagaagaccgcgaaagagcatcagaagcaggtaaaaaaggtggacagcacagcgggggtaatttcaagaatgacccgcagcgcgcatctgaagcaggtaaaaaaggtggtaagagcagtcacggcaaaagcgacaactagccgggctaatcaatgacgaatgcatttttgtctgtagctcgtcaaaaagccatcaccgccggttacccggtggttgatactgatgacaaatgtaagcttgcctgatgcgcgatgcttatcaggcctaccagaagattgcaatatattgaatttgcactgttttgtaggccggataaggcgtttacgccgcatccggcatgaacaatgcgtacgttgtcaacaatctgcaccgccggtaaccccggcggttttctgtttatggctcctgatgaacaacttctggcggtggaacgtcaaccaactttctgcttaacaacgcattgagtaaaatcgcgccaaaggttgctgtaccaatccctcccaacgtaaaaccgcccagcgtgagagcaaaatcacccgcgcccagcactaaggttactgcgaccataatcaaattaccgttctggcttaaatcgacacggttttgtacccatatccttgcgcctgcgacggcaatcagcccgaacacaacaattgatgcaccaccaataaccgcggccggaatggtatgaatcagcgcaccaaatttcggtgaaaagcccaacagcatggcgatgacggcagcagcaacaaacaccagcgtcgagtagactttggtcacggccatcacaccgatattttcagcataggtggtcacgccgctaccgccgacagagccggaaagcatcgttgccagaccatcgcctacgaatgcccgccccatatacgggtccatattgcgtccggtcatcccggcgactgccttgagatgacctaagttttccgccaccagaatcaccgccacgggcgcaatcagcatcattgcctgaccattaaaagcaggagtggaaaaatgtggcagaccgaaccaggcagcatggctgacgagagtaaaatcgacggcttttcccagccctaaaacgttggtcatcacgccatacagcagacaggcgacaattaatcctacgagaatcaataaccgctggatcatgccacgggtaaacaccgccaccagcccaatacacagcaccgtcattaccgccatccagctatcaaaggccgaagccgatacacttttcactgcgataggcgctaagttcaggccaatcgccatcaccaccgcacccgtcaccaccggcggcatcagtcgttcaatccagcgcgtaccgattttcatcaccaccaggccaatgacggtataaaccagcccacaggcgataatcccgcccagcgcaatgctgatattcgggttaatgccctgaccgttaaagcccgtcgcggcgatcaccacgccgacaaaagccgcgctggagccgagataactggggacgcgcccgccggtaataaagaaaaacagtaacgtgccgatccccgacattaaaatggaaagattgggatccagccccatcagaatcggcattaacaccgtcgcgccaaacatcgccaccgcgtgttgaacgcccattactgccgtctgagcaaacggcaatcgttcatccggcgcgaccacgccgctctctgtagaggtcgattttaactgccagtgaggaaaaccgaacattgccatcagctgtctccttaaggaggttaacaagcagggcgcatcagcgcgtgataactgcgatcgaaccacaccagcccgtagggtgtggtgtgacgatgaatcgcttcgatggcgcaaaacagaatgtcgtgggtgccgacgctcaccacctggctgatacggcagtcaaacgaaaccagagcctcttccagttgcgggcatccggtcacccccgtctgccagcgggcggcggcaaagcggtgttccatgggcgttttgccgccaaaaaggtttgaaagcggctcctgcccggcgctaagtgtatttacacacagcgttcgattttcattgaatgccggccagacggacgccccacgattcaggcacaccagtaatgtgggcggcgtatcggtcacactgcagacggcgctggcggtgaacccggcgcgcccggctggaccgtccgtggtgataatattgaccgccgcgcccatgcaggacatcgcatcgcgaaaagtttgttgatcgacaatgttcatagtttgctccttacaacagcccgcaggcttcttcaaaggacagacgtggcaggcgcgcataaagcttgctgctatcgccatagccgatattaatcagcagattgctcttcagcgtgctgcccgtaaaaaaggcgtcgtccacgtgttgacggtcaaagcccgacatcgggccggtatccagtcccagcgcccggcaggcgacgatcagataggccgcctgcatggaactgttgcgaaacgctgtttcttcggcaagttgtgggctggaggtaaaccaactgcgggcatcaccgtggggaaacagtagtggtaaccgttcataaaattcactgtcccaggcgacgatagcggtgacgggcgcggtcagggttttttgcagattgccgctggaaagtgccgggcgcagacgttcttttccttctgccgtgcgggtaaacacgatccgtgccggagaacagttagctgatgtcggcccccatttcatcagggcataaatctcccgtaacgtctcatcgctgacgggtgtctcccgccagccgttgtgagtgcgggcatcggtgaacagggtgctaagcgcacctgggctaacggcttcgttcatagcaattccttacagggcggcttcacggtgatgtaacaggctggcaagcccgttgagtaacagagcattaaacgtttcgggatcggtcacgttgcaggcgtgtccgccatagggcatcaccattttctggctatcgggcagggcggcatgaagttcactggaacatgctgttggcaccagcagatcatcactggcgcagatgatttgcaccgggcagcggatgcgatccgcatggtgactaaagtcagcgcgtttgagggcgttaagtcgacgcagtaaattatttttgccctgaaaatgcgccagtgccagcgcgtcttctgcctccaggcgaggtgcgcgggccgccatccagtcggcgggatagaggaacaacggctgcgcttccacccatgcctgcgcgccgccgctatacagtaatcgttcgcgaacctgaaaacagcggcgcgtatgggcgtttattcgtagccagccgttaacgctgatcagcacagttaccgacgcgggataatccagcgccagctgcattcccaccagcgcaccgagcgcatggccgaccactgcgtaatgctcaatccctgcggctaccagcgcctgatgcagttccgctgccatctgggcgatactgtaatcttctgccagcgtgtcgggattattgccggtgccgcgctggtcgtaacagactacctgatactcctgctccagcaccgccagttgcggtaaccagtaactgccgctacccccaagacccgaaatcaacaccactacgggcgcatcagcataagggggaggtgagagtgaaagtttcatcgcggcctcacttggcgatatgcgcaattgtggcgatttccaccagcgcgtcaggttttaccagtccgcactgaatgcagaatcgcgccggtttatcacccggaaaaaactcggcgtagatttcgttaatcgcggcgtaatttttccagtcggtaataaagatgctgttgaaggtcacatccgccatcgtgccacccgccgtctcgatcaccttgcggatagtttccagaacgtggcgggtttgcgcctttgggtcatcggcaaacagcacgttattatgttgatcaaaagccagcgtaccggagacatacaccacgccatcagccagcgtgccgggaacgaagggggccagcggtgcgctgctgccagcgggaataattacggattttggcatcgttaaactccttaagcgatatgagcaaaggacgtgggagaaagcgcgtcgcagaatgtttcgacgtcgctgacccagccaaaaaaggtttcgatattgaacaacgcggctttctgcgcaaatttcggccccgcctggtgagttgcgtcttcaagcaccacgccgaaatactccagaaaaaagccgtcgcgtagcgtcgattcgacgcagacgttggtagcgatgccggtgaaaaccagatggcgtattccgcggctgcgcaaaatgctgtccagcggcgtattgaagaaaccgctgtagcgcggcttcggcagcacaatatcgccaggctgcggcaccagttcatccaccagttgataatcccaggagcctttcgccagcaatttcccctgcagctgcggctgcttacgcatggttttcagggcgttcgatttatgaaaattcggtgagccgggtccgccagcctcgacatactgttcatcccagccattttgaaaccagatgatcagcatccctgccgctcgcgctgcggtcacggcggtttgaatgttggcaatgaccgggcgagtggttgagacatcaaacccggcgagatctaagtagccgcctggcgtggcataagcgttttgcatatccaccacgatcagcgcactttgctgcggatcgaaggtaatggcttccggtcgagcggttaaggtcgtcatcatgccacctcctgagtcagcgcaggtagatgggcgcggcattgcatcagtggttgaatgcgctcgccgaaggtttcgattcccgacagaaaatcgtcgaaggttaacagcacgccttcggcaccaggcacgcttgcgacttcatctaacatgcgcgcgacactggcgtaagaaccgactaacgtccccatattgatgtttaccgccgaagtgggatcggccatctgacgaacgttggtgtcagtaccggagcgggtatctttctgactttgttcggttagccagcttaacgcctcttcatccgcgcccgctttgtagtgttcccatttggcgcgagcggcatcgtcggtttcatcggcaatcaccataaacaacacataagagccaacgtcgcgtccggtttgctctgcggcctgtttcatccgcgcagcggtcggggcgaaagccgtgggtgtatttacgcctttgccgaaacagaagttgaaatcggcataccgggcggagaacgccatgccagcgtcgctttgcccggcgcagatcactttcatggggacactcggttgcggactcacgcgacaatcattcatggtgaaaaaatcgcctttaaaatcgcttttccccgtgccccacaggtcgcgcagcacctgaacatattcggtgagatagtcgtaacgacgggagaaatagtcatcgccaggccagatacccatctgctcatactcgggcttttgccagccagtcacgaggttgacgccaaaacgcccgccagagatggagtcgatggttgcggccatacgggcgacgattgccggaggtaacgttaaggtggcagcagtggcgtaaatctgaatgcgcgaggtcacggccgccagccccgccatcaaggtgaacgactcaaggttgtgatcccagaactcagttttgccgccaaagccacgcagtttgatcatcgacagggcgaaatcgaaatggtagtgctccgctttttgcacaatggctttattcagttcaaaggtcggcatgtactgcggcgcgtgggtcgaaatgagccagccgttgttgccaataggtacgaatacgccaattttcatcatcaacctctcttcgtctcgtaaagtgaaagtcagacggggcgctgcatcctgcatatccttttcagccgcgtattggcttgtttgcaaagcggatgccagtttttaaaaagttaatgttattaatctgttaacattacgttatctaaaatatctggtaaaaagtggactaaacggtcaaaacagttgcacataaaacatgcatctgtgcgcgatgagagtgcagaaggtcgaggccgggcgggggttttgctatcctgttgccaatctacaagaggggagagcgcatgacgcaaggcgcagtgaaaacaacgggtaaacgttcgcgcgcagtaagcgcgaagaaaaaagcgattcttagcgcagcactggacactttttcacaattcggttttcacggcacaaggctggagcagatcgcagagttggcgggtgtttcaaaaaccaatctgctgtattactttccgtcaaaagaggcgctgtatattgccgtgctgcggcagattctcgatatctggctggcaccgttaaaagcgtttcgtgaagatttcgccccgctggcggcgatcaaagagtacatccgtctgaagctggaagtctcacgcgattatccgcaggcttcgcgcctgttctgtatggagatgctggcaggcgcgccgctgttaatggatgaactgacgggcgatttgaaggcattaattgatgagaaatcggcgctgattgccggttgggtcaaaagcggcaaactcgcgccgattgatccgcagcatttgatttttatgatttgggcttccactcaacattacgccgatttcgcccctcaggtggaggcggtgacaggcgcgacgttgcgcgatgaggtatttttcaatcaaacggttgaaaacgtgcagcggattattattgaggggattcgaccacgttaaagatgccggaggaggttgtaacatcctccggctacctgtttaacctatagtcattaagctggcgttaccgccagcggcagcggtattcacactcagcgaacgctcgatatacagccgttccagaaggatattgctttcgccacgggcaaaaccctgcaccgaaacaattgtgccatcccgcgcggcaactgcttcacacaatgcgcgaagctgatccgaatcaccgtggaagatcaccgcatcaaacggttgagcggttatattttccgctttcgccagttgaatacgttcgctgactgccgatggcaatgccttcactaactgacgatgcagcgcgtcatccggccacagtacctggctgcccaccgccagcacggcggcgagctgagtcagcgcatcctgctcatcatcggcaatacacaacacgcgctcacgcggcagcagcgtccaggtgttgcgttcacccgtcggccccggcagcaatcgttgtgttcctgcctgcgccagctcgccatattgcgtacataacgcctgcaattctggacgatttgctgcccattcccgcagtgcatttagcggctgagtcaatgcggctttcaactgcgcatcgaccggatactttgcatcctgacgcgcgagcgtcactgccagcgcactttccgggcgattcgccagcagacggtagagatagagcggaccgcctgctttcggcccggtaccggacaacccttcgccgccgaacggctgcacaccaaccactgcgcccaccatattacggttaacatacaggttaccaacatgggccgagccagtgacctgggcgatggtttcatcaatgcgcgtatggacgccaagcgtcagaccataaccggaagcgttaatctgctcgatcagctctggtagctggttacggttgtaacgcaccacatgcagcaccggaccaaagacctctttttgcaattcggcaaagtcatccagttcgatcagcgtcggggcgacaaaggtgccgctttgccattcacgggcatcttcgctgttttcccgcaccgcctggaacaccggacggcctttgctacgcatggtctgaatatggcgctcaatattggctttcgcttcgctatcaatcactggaccgatatcggtggtcaggcgacccggattacccatccggcattcggccattgcgccgcgcagcattttcaacgtgtggtcggcaatctcatcttgcaggcacagcacgcgcagcgccgaacaacgctgacccgcactgtcgaacgccgaggccagtacatccacgacgacctgttcggtcagtgctgaagaatcgacaatcatcgcgttcatgccgccggtttcagcgatgagcggaatagggcgaccctgagcgtccaggcggctggcgatattgcgctgcagtaacgtagcgacttcggttgaaccggtaaacatcaccccgcgcacgcgatcatcacccgtcagttgcgcgcccacggtttcaccccgacctggcagcaattgcaccacgcctggcggtacacccgcttccagcaaaatggcgatcccttgcgcggcaatcagcggcgtttgttctgccggttttgccagcacgctgttacctgccgccagtgcggcggcgatctgcccggtgaaaatagccagcgggaagttccacggactgatacacaccacaggccctaatggacggtgggtttcgttagcgaaatcatcccgcacctgtccggcgtagtagtggagaaaatcgaccgcttcgcgcacttcggcaatggcgttactgaaggtttttccggcctcacgcaccagaataccaatcagttgctgcatctggctttccatcagcacggcagcgcggtgcaaaatcgctgcgcgttcagccggaggcgtggcaaaccagattggcgcgttattaaccgcactttccagcgcctgttctacttcacgcggcgtggcttcacgcacatagcccacaatatctttcggttccgcagggttaataacgggcgacatctcacctgccgctaccggttgttccagcattggcaaggcctgccatttttgcagtgcactattgagcagggcagaggagagcgaggccaggcggtgttcgttagcgagatccagccctgccgagttgtcgcgcccgtgaccgtaaagatcgcgcggcaggggaattttcggatgcggtaatccagtttgcccttcctgttgcgccagtttttctacagcagtgaccggatcggcgaccagttcatccagtggcaaagaggtgtcggcaatacggttaacaaacgaggtgttagcaccgttttccagcaggcgacgcaccagatacgccaacagcgtttcatgtgtgccaaccggagcataaatacgacacggacggttaagtttgccgtcggcaactttcccggtgacctgctcatacagtggctcgcccataccatgcaggcactggaactcgtactgacccgggtagtagttctgccccgccagttgataaatcgccgccagcgtatgggcgttgtgcgtcgcgaactgcgggtagattagattcggcaccgccagcagctttttcgcacaggcgagataagaaacgtcggtatacaccttgcgggtataaaccggataaccttcaaggccgtccatctgcgcacgcttaatttcactatcccagtacgcgcctttcaccaggcgaatcatcagacggcgacggctgcgggtggcgagatcaatcaggtaatcgatcaccaacgggcagcgtttttgataagcctgaataacaaaaccgatgccgttccagcctgccagttccggctcgaaacagagtttttccagcagatcgagggagatctccaggcgatcggactcttcggcgtcaatgttgataccaatatcgtactgacgcgccagcagggtgagtgatttcagacgcgggtaaagctcttccattacccggtcatactgggcgcggctataacgcggatgcagcgccgacagtttgattgaaatgcccggcccttcatagatgccacgaccgttagacgctttaccgatggcgtgaatcgcctgctgataggaaaccatatacgcctgtgcatctgcggcggtcagcgcggcttcgcccagcatatcgtaagagtaacggaaacctttctcttccagcttgcgggcattggctaacgcttccgcgatggtttcgccagtgacgaactgctcacccatcaggcgcatcgccatatccacacctttgcggatcagcggttcaccgcttttaccgataatgcggttcagcgagcgggagaggctggcttcgttatgggtggaaaccagtttgccagtaaacagcagcccccaggtggcggcattaacaaacagtgacgggctacgaccaatgtgtgactgccagttaccgttgctgattttgtcgcgaattaacgcgtcgcgggtggctttgtcgggaatacgcaacaacgcttccgccagacacatcagcgccacgccttcctgcgatgacagcgaaaactcctgcaataacccctggaccatacctgcgcgaccactggcatttttttgattacgcagtttatcggccagctgatacgccagtttgtgcgcctgttcagcaactggctgcggcaggcgggcttgttccagcagcatagaaaccgcttcggtttccgggcggcgataggccgcggtgatcgcggcgcgggaaaccgactggggcaatatttgctcggcaaagtcgaggaatggctggtgtggttcctctgccggagtcggtgcttcatcgctctcattggccgcgccagaaagcagcgcaggtagctccggcagagtatcgctgttttccagttgttcgagataagaaaaaatcgcctgcttaattaaccagtgtggtgtgcgatcgatacgtgtcgcggcagacttaatacgctcacgcgtcgcgtcgtccagcttaacccccatggtggtggttcccatgccattactcctgttgttcagaaaggtgcaacttaacgttatcgtgaaatatccatgatgttgcaactttgtgcaaccatgttaaatgtgacatgcgtagcaagcttaaaaatgaatgaaatgttaataaaagaaatcgatatgacagggattaaaaaaataactcagactttttctctgcggcagttaacatttttgaaaggtgcaaccgcaaaaaatgtgagagagtgcaacctgatgaaaaatagtgtcgctgagcactaaaatttaatgtaaatggtgtgttaaatcgattgtgaataaccagcgcttccggcaggatacggtcgccctggtaaaacataaactctgttaccccgttccggtggcagatataacggcaagtttcgacattgccgataataattttttggagactttagatggctattagcacaccgatgttggtgacattttgtgtctatatctttggcatgatattgattgggtttatcgcctggcgatcaacgaaaaactttgacgactatattctgggcggtcgtagtcttgggccattcgtgacggcattatcggcgggtgcgtcggatatgagcggctggctgttaatggggttgccgggcgctgtttttctttccgggatttccgaaagctggatcgccattggcctgacattaggcgcgtggattaactggaagctggtggccgggcggttgcgtgtgcataccgaatacaacaataacgccttaacactgccggattatttcaccgggcgctttgaagataaaagccgcattttgcgcattatctctgcgctggttattttgctgttcttcaccatttattgcgcttcgggcattgtggcaggcgcgcgtctgtttgaaagtacctttggcatgagctacgaaacggctctgtgggcgggcgctgcggcgacgatcctttacacctttattggcggtttcctcgcggtgagctggactgacactgtacaggccagcctgatgatttttgccctgatcctgacgccggttatcgtcattatcagtgtcggtggctttggtgactcgctggaagtgatcaaacaaaagagcatcgaaaacgttgatatgctcaaaggtctgaactttgttgccattatctcactgatgggttgggggctgggttacttcgggcagccgcacattctggcgcgttttatggcggcggattctcaccacagcattgtccatgcgcgtcgtattagtatgacctggatgatcctctgcctggcaggggcggtggctgtcggcttctttgggattgcttactttaacgatcatccggcgttggctggtgcggtaaatcagaacgccgagcgtgtgtttatcgaactggcgcaaattctgtttaacccgtggattgccgggattctgctgtcggcaattctggcggcggtaatgtcaaccttaagttgccagctgctggtgtgctccagtgcgattaccgaagatttgtacaaagcgtttctgcgtaaacatgccagccagaaagagctggtgtgggtagggcgtgtgatggtgctggtggtggcgctggtggcgattgcgctggcggcaaacccggaaaaccgcgtgctgggcttagtgagctacgcgtgggcaggctttggcgcggcgtttggtccagtggtgctgttctcggtgatgtggtcacgcatgacgcgtaacggtgcgctggcggggatgatcatcggtgcgctgacggttatcgtctggaaacagttcggctggctgggactgtacgaaattattccgggctttatcttcggcagtattgggattgtagtgtttagtttgctgggtaaagcgccgtcagcggcgatgcaaaaacgctttgccgaggccgatgcgcactatcattcggctccgccgtcacggttgcaggaaagctaagggacttagcctgcggcggttttgtttggcttcagcagcgggttgcgctcccttaatgtgcctcgccatataaattgaatggtgcagggagcgcgcagggggcggccaatcgccgccgccccctgctgtcccggccttcggggaacgcttcagcgattttgacgccaccaacacccgagctgttattatgttccgggcaaaaagttagatttgataatcgcggatggacgaaattgcttgatacacccgcttatcagttttacatggaagctctgatgcattgagtctggacagttttgtcggctggatacggcgtttacgcggcatccggcaagaacacatggttctttgcaaacaatcccatctttctaccctggaataatcgtttatatcccttggcattacctctctttgtttacattccaacatcattttataaacattccgcttgtgtttttctttgccgtaatgataatcgctatcactgcgatttacttttctttgcatagattgactcagaaaaacgtttaagggtgggtggcatgtttgttccgtttctcattatgttgcgcgaaggacttgaagccgcgctgattgtcagtttgattgccagctatcttaagcgtacccagcgaggccgatggattgtgtgatgtggattggcgtgttgcttgccgctgcgttgtgcctgggcttgggtatcttcattaacgaaaccaccggcgaatttccgcaaaaagaacaggaactgtttgaaggtatcgtggcggtgatcgccgtggtgatccttacctggatggttttctggatgcgcaaagtgtcgcgcaacgtcaaagtgcaactggaacaggcagtcgatagcgcattgcagcgtggaaatcatcatggctgggcgctggtgatgatggtcttttttgccgttgcaagggaagggctggagtcggtctttttcctgctggcggcatttcaacaagatgtcgggatctggccgccgctgggtgcaatgctcggtcttgctactgccgtggtgctaggcttcctgctctactggggcggtattcgcctcaatcttggtgcattttttaaatggaccagcctgtttattctcttcgtcgccgcagggctggcagctggtgccattcgcgcatttcatgaagccggattgtggaaccactttcaggaaatcgccttcgatatgagtgcggtgctctcaactcactcgctgtttggcacgctgatggaagggatttttggctatcaggaagcgccgagcgtcagcgaagtcgccgtctggtttatttatctcatcccggcgctggtggcatttgctctgccaccacgcgcaggggcgacagcgtctcgctccgcgtaacaaatacgacgcaaactcttgcttagttacaacatactttaaagggatagtctcgtcatgaccattaacttccgccgtaacgcattgcagttgagcgtggctgcgctgttttcttctgcttttatggctaacgccgctgatgtgccgcaggtcaaagtgaccgtgacggataagcagtgcgaaccgatgaccattacggttaacgccgggaaaacacagttcattattcagaaccacagccagaaggcgctggagtgggagatcctcaaaggcgtgatggtggtggaagagcgggaaaatatcgcccctggctttagccagaaaatgacggcgaatttacagcctggcgaatacgatatgacctgcggtctgctgactaacccgaaagggaagttgatcgtcaaaggtgaggcaacggcggatgcggcgcaaagtgatgcgctgttaagtcttggtggtgcaattactgcatataaagcgtatgtcatggcggaaaccacgcagctggtgaccgacaccaaagcctttaccgacgcgattaaagcaggcgatatcgaaaaagcgaaagcactgtatgcaccgacgcgccagcactatgagcgtattgaaccgattgctgaactgttctccgatctggatggcagcattgacgcccgtgaagatgattacgagcaaaaagccgccgacccaaaattcactggtttccaccgtctggaaaaagcattgtttggcgacaacaccaccaaagggatggatcagtacgctgagcagctttataccgatgtggtcgatttgcaaaaacgcatcagtgaactggctttcccaccttcaaaagtggtcggcggcgcagccggactgattgaggaagtggcagccagcaaaattagcggtgaagaagatcgctacagccacaccgatctgtgggatttccaggctaacgttgaaggctcgcagaaaattgtcgatttgctgcgtccacaactgcaaaaagccaacccggaactgctggcaaaagtcgatgccaactttaaaaaggtcgataccattctggcgaaataccgtactaaagacggttttgaaacctacgacaaattgaccgatgccgaccggaatgcactgaaaggaccgattactgcgctggcggaagatctggcgcaacttcgcggtgtgctgggactggattaagcgttatgcagtataaagatgaaaacggcgtgaatgaaccgtcacgccgacgtttactgaaagtgataggtgcactggcgctggcgggaagttgtccggtcgctcatgcacaaaaaacgcaaagtgcgccgggtacgctttcaccggatgctcgcaatgagaaacagccgttttatggtgagcatcaggcagggatcctgacgccacaacaggccgcaatgatgctggtggcgtttgatgtgcttgccagcgataaagccgatcttgagcggttgtttcgcttgttgactcagcgttttgcttttctgactcagggcggagcagcaccagaaacgccaaatccgcgcctgccaccactcgattccggcattcttggcggctacattgcgcccgataatctcaccatcacgttatcggtgggtcactcattgtttgatgagcgctttggccttgcgccacagatgccaaaaaagctgcagaagatgacgcgtttccccaacgactcgctggatgcggcgttatgtcatggtgatgtgttgctacagatttgcgccaacacccaggacacggttatccatgcgctgcgcgatatcatcaaacacacgccggatttgctcagtgtgcgctggaagcgggaagggtttatttccgatcacgcggcgcgtagtaaaggcaaagagacgccgattaatttgctgggtttcaaagacggcactgccaatcccgatagccagaatgataagttgatgcaaaaagtggtgtgggtaacggcagatcagcaggagcctgcgtggacaatcggtggcagctatcaggcagtacgcttgattcagtttcgagtggaattttgggacagaacgccgctgaaagaacagcagacgatttttggccgtgataagcaaaccggtgcgccgctgggaatgcagcatgagcatgatgtgcctgattacgccagcgacccggaagggaaggtgatcgcgctggacagccatatccggctggcgaatccccgcacggcggagagtgagtccagcctgatgctgcgtcgtggctacagttattcactgggcgtcaccaactccgggcaactggatatggggttgctgtttgtctgctaccaacacgatctggaaaaaggcttcctgacagtacaaaaaaggctcaatggcgaagcgctggaggaatacgttaaacctatcggcggcggttatttttttgcgctgccgggggtgaaggacgcgaacgattatttcggaagcgcgttattgcgggtttaatgtttttaggcggataaggcatttgtgcgcagatgcctgatgcgacgcttgcgcgtcttatcatgcctacaatcagtgcgggtttggtaggctggataaggcgttcacgccgcatccggcgatcgtgcactgatgcctgatgcaaatcctgctgaaagcacacagcttttttcatcactgtcatcactctgtcatctttccagtagaaactaatgtcactgaaatggtgttttatagttaaatataagtaaatatattgttgcaataaatgcgagatctgttgtacttattaagtagcagcggaagttcccggcagtgatagtcagtcactatggagatcgcggatggtaacgtcctgtactggacatgttttagataatcaacgcgccaccactcgcggagttttctcctccggtagtcatctcgtcactttgcattttcaacctcatcctttcttttcatgtgttaccgacgccgtaaacggtgcgcgtagccgtttttcggcattttatccaaaagcaaactatggcttacaaggaagccaaccctctgatgttcgtgcgcataatcgcgctgccaacggcgcgtgtgatgaatacaaacaactcaaggtgctctccatgggaagacaaaaagcagtgatcaaagctcgtcgcgaggcaaaacgtgtgctgagacgggattcgcgcagccataagcagcgtgaagaagaatcggtcacctcgcttgtgcagatgggcggcgtagaagccattggtatggcccgcgacagtcgcgatacttcgcccatcctcgcgcgaaatgaagcgcaattgcactatctgaaggctattgagagtaagcagctgatattcgccacgggcgaagccgggtgcggaaaaacctggatcagcgcagcaaaagcggcagaggccctgatacataaggatgtcgacaggattatcgtcacccgtccagttctgcaagccgatgaagatcttggcttcttacctggagatatcgcagaaaagtttgctccctattttcgcccggtctacgacgtgctggtccggcgcttaggggcttcctttatgcagtactgcctgcgaccggaaatagggaaggtggaaattgcgccgttcgcctatatgcgtggacgtacctttgaaaatgcagtcgtcattcttgacgaggcgcagaatgtgactgccgcgcaaatgaaaatgtttttaacccgcctcggggagaacgtgacggttatcgtcaacggtgatatcacgcaatgcgatttgcctcgcggcgtgtgctccggattaagtgacgcgctggaacgtttcgaagaagatgaaatggttgggatcgtccggttcggtaaagaggactgcgtacgttcggcactttgccaacgtacgctgcatgcctacagttaagtgtgttatcggtgcagagcccgggcgaaccgggctttgttttgggtgtttatgcccggactagcgctttttctgaaacaaccatttttatttgcccctggctggtgaagtgtacgctcatcctgtggcttttttgtagttgctgatagagctcatcaggtattgctaagctctctgcatattcttgcggcgtatattggtaggctgcatgatgctgctgtttttgaaaacgcagcttattgtacagcgcccagacaattaacacgacggcattcgccactgccagcaaaaaatagaactgaagtcggcttctggcctcgctttgccagtaataacccgtcagcagatccatggcgaataagaatatgaacaacgcaaataatgtccacaagatggttgtggcaacataatcaaccagtaaacgtactggtgattgtcgggtcgtaataattaaattgttcatattaacctctcagaatcccgcgatcgggacttacccaacgggcgcgttgctttttaggcatcaacatgactcgtgtaaatgataccaatgtcgttgccaggctcagcatccagaaaataaccgggaaccaaataatccagaaaagcgatgaagtcagattatgctcatagcgattctcgatcatcaggctgacaataaattgcagtaaacataacgtacacaataatattccggcagtatgtgtcgcagcgatatgtgtcaattcaatatttaacggtacaccggcaagttggactgcgtaaataatgaaaccgaccaggcaggtgaaggcccatattgtcgtcaggcagtattcaaaaaacagcggccacattcgaaagttttctttgcgccacaaccttgtcatatttttgaggaatacttctgcaccgccctgagcccagcgcaggcgctgtttccacagcccttttaacgtttcaggcattaatatccagcacagtgcccgtggctcgtaaaaaatcgtccactgattcaactgcagcttccagctaatatcaatatcttcggtgatcatatcgtcactccagtaacccacttctgccagggcgctgcgacgaaatgcggcaataacaccggaaacggtaaatacgtttccatagatacgctgggttcgcttgatcaaaccaataattgaggaatactcgccaacctgaattttacccaccagggtagaacgtgttcgaatacgaggattaccggttacggcacccacacgcgggttgtacaacatcggttccacaatatatgccgccgcatcgcggtctaataacgcatcgccatcaatgcacaccagatattcacttttcgccgcggcagctccggttttaagcgcaatggctttcccctggttttgcgccagatgaatgacccgcaaatggggaatttgtgcagccatgcgatccaggatggcacgggttttatctgttgaaccgtcatttacggcaataacttcaatgttctcataacgctgtgctaaagcggcgtgtatggtttcctcaacgtttttctcctcattaaaacagggaatgataatggagatagacggattatctttcaactggggagctggtgcgttttctccccacggccagtggcgttcacgatagacccagaaatagacgccgccaacaatccacataatggacataaaaaacggccagaagaaaacgaacctcatcatcagttcaccagagtgaaagtacgctacgcataggggtatgcataacaccagacataatataaaaaacgatacgatgcgattaatcatttttcggataccaggctgttgaaaactcaggacgaataaggtctatttcaggttggttatgcagaaaattgtcgggataataaccatagtttttcactccattcagttgtaataggctcatccagtgagcgagttgttgcgaagaaatagcctgatgctgaccatttttctgccagttttgtgcctgtaattctaaaatagatttgtctttagcctgagggatgtttttaatttgattggtcaattgtattaaccattggtcagccgatttttctgcgacaccttccagataaggcatagccataatagcggtccagtcatagctttttaggaaatcagcataattctgtgcaaaccaggcttcactttcaggttgtattaccggaagtgcaaaaatatttcgtgcagttttaatatgtggaccgcgaatggcttttacgcgcgcactaagttctaaagtgaagtcagttaacgcacgacttttaaagcgggcccactgtttaaattgctccgggttttgtcgaatttcgctcagactcccgctaaagcctgcttgctgataagccgtgatagccggtgcactggcatcttcataatctgaaagcaaagcatcatcgtggaacaatatgccatcaaaagcagcatgtccggcaagatcttcatataacatgccaacttgtgctctgactctgtcatcgaaaggagagagacggtgatattgttcaggatgaatttgtgcttttttctcccctgttggtaagtattttactcgcgttaatgtgggatctaaatcccagcttaataccggcatccacgcatagatgtttacacctgagcgggtacgtaattgccaggcaacccgactaaaaatatctgctttcattggtagcaaacgatttggaaaccagacctctttgaccagcccatcaccatcgggatcagcaaatgcctgcaaatacacggttgatatttgcatatctttcacccgctgaattagcacatcaatattgcgatccatttgctggaggttttcgtcataaacgtaatcaagatcgatatgcattatccgttgtggtgatttttcctgtacggtaataatttgctgggcaaactcttttaatgagggattattggcgattaatacccgcggaatggaatccaattgcgacgcatttgccaaacctgattcaagggtgaagaacatgtcataaccgagtttttttaattcctctatcgctatgccattcgcttcgccataaggccaaacaaaaacgtgtggatttacctcaacctttgtacgcaggtattccgtcatttttacagcatccagacgaattctttcccggtattctgctgcggtttcataccgtgcgtggtcagtaaaatatgcacgatttacatatacaggcaataagctgccggtggcattagcctgaataccgtagtgagaattccatgtatgagaagcgagctcaacgagccgggaacgcgcaacttctcgcacttgttgccacgtggcaaaatattctcgatcgaccaactcatcgccaaattttacttgtttatccgctggcgtatcgacccaactgccgacgggggcccatacagcaggccactggaaggcctgaagaattgggaagacgcgggtataaaaactctggtagccgtcatcaaaagtcagcactacagctttttccggtagcggttttcctcctcgatgtgcttcacgaatttgagcaatactgaccggttgataaccgttctcgcgcagccaggcaaattgttcacgcagtgctgatgtccgcactgacataaaacgctggtcggcagcttcgtcttcaacgttatgccatgaaatcgctacaaaaccattatgcggccacggttgctcggcgagtaaagattcgcgatcctgtggcggtataaatgatgttcttgactggctaatgcacgcggtgagcataattatactcaccagcatcaggagatatttatttccattacgtaacatatttatccttaaaatctgaatgtcatatcgaattcaacgtataagttgtgttctctgtcaccgtcataaggtcgtttttcccagcgtagcgttgcgccagcatcaatcacgtcattccaactaatgcgttgcccgtagccgagttgggtgacgacatccgtgccataatgtttttgccaggaggcaccaacacctgcgctgaatatttgctcccagctattttcatagcttcgccataacaaatggcttgcctcaaatgccggaacaatatcgaacgtttttatagggttgtagtatggggtatcgtgttctgtattttgttcgtaatacagactgggtaggaaatcgacaatcaaatatggtgaagaccagatgcgttcctgaccctcaagtgagacttcatgacgctggttactgtcggaaaaatcagtgaaagcccaggagacaccgtacttacgccgctcattttgataccagcgaacataagcctgagcactgttgcctgtaacaccatttttcattgcccgtaatggaacgcggtgagagaggcgttccagttgcgaaccaatacgccagttatcattaaaatcataccagccagacaggcgcgcgccgggtttatgctcatgattgaaaacgcgttcagcgtactctgcctcgagccagatattacgtgaccgccactcaacacccgcaagccagtcgcgaacaatcccttttccttcgctaaattgtccatcggcataaccgaatccagcaaaaccgcgccagttatccttcagcggtggtgaataaacgatggtggttaagtcgacatcatgtttaccactatccgggccttcggcatcaattcctgttgagccagcgatacgaagctctgcaagattatgtacatcaaccgcacgttttaatcgtacaacgccgggatcttgcggttcacgttcgacaacatcgtgcgttaagacagctgcctgctgccattcttgtaacgttaatgctgtccaggcttgttcaacctccagattaatattacgtggctcgatcacttctgctttttttaattcattttctgctgcacgaggccaaccgcgggcttgtaacacactcgcgtaatcaatgcgcagtccctgatttcctggtgcgttataagcaagctctctggctgtcatttcagcctgaggaagatcattactatattttgctacggttgagagaaacgaatgcccctgtaaccaggtatcattcgggatgctcgtaggcgtgcccattaaccgaaggaaaggcggcgaagtattaatggtatgttgggtgacagttagcgcgcccggataattttcactctccaggtggctgtaaaagagatccgcaagttcttcatcggataaatccggggcaatggtctccttgtgataaaagagctcggtcattattgactgtgcttttttcggctgatgatctttgagataagccgatgcaacccaatattgcccccagggcggaataatttgccccgtcttttttaatcgctgatagtgagaaataacgtctttataacgatcgcgagttaataacgcgccaagatgatcaacctgaatacgctggtactgggcagtgcggtctgggttatcgtgccacagaatttctaatgcagcgtattgggcgagggcgcgatcggcaatggcataacgttcactttcactgcgcgtaggcataaacgacagtctgaccagttcggcatgaatatcagcgcgaatatctggcgttaaattggcatcgtcaatcgcggcagcaagttgattattacgtaatgcctgcacgtattctgtgggatattgttgcgtagatgcattttcaggtaatgactctgtcatcgcccgtaattcatcctgatgacgccccgccagtttatagatataggcttctgcgagtaaattggctttgtccggtgctccagagttaagctgcttaagtttaaccagcgcagtatcatagtgaccagcatctgccagggttaaaatttgtccccgttgataatccttattttgcggctccagagagagcgccttttgccacagtgtaagcgagttttgccattgttgcaggttacgataagcgacggcgacagctgcataaccacgcgctggtaattgctgatgacggtagcggttgtaaacggtaataacctgtttatcttgcccggcccataaggcaatctgtaaccagtcagcaatttggttattgctgagtgctgattttagtgcaaaccatgacaaagctggctgagtattacccttgcgagcttcaataatcaatgcatcataggcgttattaacagcactcttcgccgcgggactcgctgctaaaaatgcggcagtaagaagtttcaaagcccatttggttttcgggcacctttttctgctacttgaatacatcctgtattactccatgtattgccaaaatctctctctgtatctaattacaggtaactgaaaagaaagatatttttgcacctcataatccgttattaaacgcggaagagagacgtgaattgttgatgatgagaagaagaaatgatgagcagagtgtccatataaaatccttttctcgcccgaaaatccattccaatgatgaggatcttcaggaatacggcataaatcccaatgcctttttcaaaataaattaggattaaaataattaaatcagtaaattccgatgcatgatttcggatttttcgaaagtcctgatgaaaggctgcgctacggcactcacggatttaattgttattcctaatgtatctatgaattaatgttttataaggattttctataaccatttataagtattttcaagcctggcttgttgcaaacaatgtataaagcacttaggcaataataattacattcagcaactatcatcatcggtattgtttgtgggcggaatttcatattgacaacagtacagttcttatatctattaataatagaaagggatctacaacctacagattggtgtagctttatggaaaaagactatttgagaattagtagtactgtattagtgagcttattgtttgggcttgctttggttttggtgaatagttggtttaatcagccaggcgttgaggaagttgttccacgatcaacctatctgatggtaatgattgctttattttttatcgatactgttgcatttatttttatgcagttgtatttcatttatgaccgtaggcaattttcaaactgtgtacttagtttggcttttctgagttgtttgatttactttgttataaccgtcattatcattcagcaaattattgaggagcgtttgacaagcagtgttgtccaaaatgacattgcaatctattatttgtttcgtcagatgagtttgtgcatattaatatttctggtattggtgaataaagttagtgaaaacacaaaacagcgcaatttattttccaaaaaaatgactttgtgcataagtttgttttttgtttttggggggccgatagttgctcacatactttctagtcattatgagagctacaatttacacattgccgagttaaccaatgaaaatggtcaggtggtttggaaagcctcatatgttaccataatgattttcatgtggttaaccttgctttcggttaatctatactttaatggtttacgctatgatatctggaatggagtgacggtgattgctttttgtgccgtactgtacaatatctctctgttatttatgagcaggtatagcgtgtccacttggtatattagtcgcactattgaagtagtcagtaagttaaccgttatggtaatatttatgtgccatatattcagtgcgctacgagtaacaaagaacattgcacatcgcgatcccttaaccaatatatttaacagaaattatttttttaatgaactgacagttcaatcagcatcagcccaaaaaacgccttattgcgtcatgattatggatatcgaccacttcaaaaaagtcaacgacacctgggggcatccggttggcgatcaggtgataaaaacagtggtgaatatcattgggaaaagcatacgaccagatgaccttttagcgcgcgtcggcggcgaagagtttggcgtcttgctgacggacatcgatactgaacgtgcgaaagctttagcggaaaggattcgggaaaatgttgagcgtttaactggcgataatcctgaatacgctataccacaaaaagtgacgattagtattggcgctgttgtgactcaggaaaatgcgttaaacccaaatgagatctatcgactggctgataacgcactttacgaggcgaaagagaccgggcgtaataaggtggttgtgagggatgtggtgaatttttgtgagtcaccataaagcggcattttgatcctacccacgtaatatggacacaggcctaagcgaggttcttgttttcaaattgttccggactgaggccgccacaccaactgtgccgccgccaccgattgtaatcacattcgatataattaaacaccgttgcccgcattatttcccggctgataaagtgttctccatggatacattccactttcagcgaatgaaagaagctttccacgcaggcattatcgtagcagcaaccttttgcgctcatacttccacgcagattatgccgcttcagttgcgcctgataatctgctgaacagtactggcctccacggtccgtgtgaacgataacgttccggggcctcttacgccgccacagcgccatctgcagggcatcgcaggccagttgcgccgtcatgcgtggcgacattgaccagccaataacggcacgtgaccacaggtcaatgaccactgccagatacagccagccttcatctgtacgtaagtacgtgatgtctcctgcccacttctggttcgggccactggcgtaaaaatcctgctccaacagattttctgacacaggcaggccgtgtgcgcggtagctgaccgggctgaacttccgggaggcctttgccctcagtccctgacggcgcaggcttgccgccacggtttttacgttaaaggggtaaccctgagcacgcagttcatccgtcaggcgtggggcaccgtaacgctgttttgaccgggtaaaagccgcgaggacaacgctgtcgcagtgttggcggaactgctgacgcgtgcttatccttgtccgccgctgacaccacgtataccagccgctgcgggccacccggagcacgcggcacattgctttgatgctgaactcagcctgatgtttttcaataaagacatacttcatttcaggcgcttcgcgaagtatgtcgcggccttttggaggatagccagctcttcatcccgttctgccagctggcgtttgagacgtgcaatctcggtagacatctccagttcacgttcagaagacgtctgctgattttgctgtttactgcgccagttgtagagttgtgattcatacaggctgagttcacgggctgcggcagtaacaccgatgcgttcagcaagcttcagggcttcactgcgaaattcaggcgaatgctgtttacggggttttttactggttgatactgtttttgtcatgtgagtcacctctgactgagagtttactcacttagccgcgtgtccactattgctgggtaagatcagtgcctggcacacgcgtttgatggaagacggcgttcaggcaatgcgcgattatcttgccggactggatatcgcttcgccagagcatcaggttctgatgaacgtaacagcaaaaagcgaggtcgctccgtcaattatcaaagaaaatctctcattacacttaactcatacggtgaaatggactgaatctctcgatacatttctgaatatgccaaccccggtagctttccttgaaataagtaataagccctatttggggaatatgttaaatgattttgctggcgtggatcagcaacgagttatgcattgtcgtaaagcatttagtgatgcaaaggtattcaaatgattcctgattatttaacttttattcgctttcaggataaacgaaatctgatatacatttatgctattggacttattctgataggcttttattggaagaatgcagggtttacttttccatcagaggatattggtgtagttagtgggattctggctctggtgctgtataattttatttttgatctcaaggcgtactgggcttataaatgcgtcacgaagaatatcgatttttcgtggtttaagaaaaagcagaaccacaaaatagaattatttcttacacaacctctggtggcaggatttctgtcgttaatcatgttgagtgcaatgagttgggggctataccagcttctaccctcgttatatgcgctgttcctgatttcgttacttgggccgttggtcatctttctgctgtttcggatgatccgcaccagttatgtcaagcaggtcgctatttcagtagcgaaaaaagtaaaatataaaagtctgactcgctatgtgctgctttcggtgtgcatctcaacggttgttaacctgcttactatcagcccgttgcgtaacagtgattcttttgtgacagaggggcagtggttaacgtttaaatcgataattgcattgctcattctttgtggcgtagtgttggcgattaatctgttttttctgcgcttctccaagcggtacgcttttctgggcaggctttttttgcaggaaatcgatctgtttttctccagtgaaaatgcgttgtcgaccttttttgccaagccgctttggcttcggttattcatattgctggttattgaagtgatgtggattacgctggtgtcggtattggcaacgcttgtagaatggcggatttggtttgaagcctattttttactctgctatgtaccgtgcttaatttactattttttctattgtcgattcctctggcataacgattttatgatggcatgtgacatgtatttccgttgggggcattttaataagtgaggaagtgataggaagtgaccagataatacatatatgttctgtactctcttgcgcattttgattgttgactgagtaaccagacagttgatgtgcacgatttcccctcgccctaacagacgtgggcgggggcacccggtgtgtgcaatatacgaaaaaaaagcccgtactttcgtacgagctcttctttaaatatggcggtgagggggggattgactcgcttcgctcgccctgcgggcagcccgctcactgcgttcacggtctgtccaactggctgtcgccagttgtcgacccccggtcggggcttctcatccccccggtgtgtgcaatacacgaaaaaaaagcccgtactttcgtacgagctcttctttaaatatggcggtgagggggggattgactcgcttcgctcgccctgcgggcagcccgctcactgcgttcacggtctgtccaactggctgtcgccagttgtcgaaccccggtcggggcttctcatccccccggtgtgtgcaatatacgaaaaaaaagcccgtactttcgtacgagctcttctttaaatatggcggtgagggggggattcgaacccccgatacgttgccgtatacacactttccaggcgtgctccttcagccactcggacacctcaccaaattgtcgttcctgtcttgctggaacgggcgctaatttagggaaatcatgacctgaggtcaacaaactttttgaaaaaatcgcgcgtttattcaaacttcaatcaatgtgtggttttaataagcgaaatctgctttttttgccaccgaccacggatttgttatgctggtggcctttgtagatcataacgataagtgcgaataaatttcgcacaacgcttttcgggagtcagtatggatatcatcttttatcacccaacgttcgatacccaatggtggattgaggcactgcgcaaagctattcctcaggcaagagtcagagcatggaaaagcggagataatgactctgctgattatgctttagtctggcatcctcctgttgaaatgctggcagggcgcgatcttaaagcggtgttcgcactcggggccggtgttgattctattttgagcaagctacaggcacaccctgaaatgctgaacccttctgttccactttttcgcctggaagataccggtatgggcgagcaaatgcaggaatatgctgtcagtcaggtgctgcattggtttcgacgttttgacgattatcgcatccagcaaaatagttcgcattggcaaccgctgcctgaatatcatcgggaagattttaccatcggcattttgggcgcaggcgtactgggcagtaaagttgctcagagtctgcaaacctggcgctttccgctgcgttgctggagtcgaacccgtaaatcgtggcctggcgtgcaaagctttgccggacgggaagaactgtctgcatttctgagccaatgtcgggtattgattaatttgttaccgaatacccctgaaaccgtcggcattattaatcaacaattactcgaaaaattaccggatggcgcgtatctcctcaacctggcgcgtggtgttcatgttgtggaagatgacctgctcgcggcgctggatagcggcaaagttaaaggcgcaatgttggatgtttttaatcgtgaacccttaccgcctgaaagtccgctctggcaacatccacgcgtgacgataacaccacatgtcgccgcgattacccgtcccgctgaagctgtggagtacatttctcgcaccattgcccagctcgaaaaaggggagagggtctgcgggcaagtcgaccgcgcacgcggctactaataaagcatcaggattcctgctatccttggcgggaattgaatacaggagagagttatgtatcccgtcgaccttcatatgcataccgttgccagcacacatgcatatagcacattaagtgattacattgcccaggccaaacaaaagggcattaaactttttgcgatcaccgatcatggcccggatatggaagatgcgccgcatcactggcacttcattaacatgcgtatctggccgcgagtggttgatggggtagggatcctgcgcggcatcgaagctaacattaaaaatgttgatggtgaaattgactgcagcggtaaaatgtttgactcgctggatctaattattgccggttttcatgagccggtttttgcgccacatgacaaagcgaccaatacacaagcgatgatcgccactatcgccagcggcaatgtgcatataataagccatcccggaaatcccaaatatgaaatagatgtgaaagccgttgctgaagcagccgcgaaacatcaggtggcgctggaaatcaataattcctcatttttacactcacgtaagggcagtgaagacaactgtcgtgaggtagccgcagcggtacgtgatgctggaggttgggtggcattaggctcggattctcacaccgcgtttaccatgggggaatttgaagagtgtcttaaaatcctcgacgcggtagattttccgccagagcgcattttgaatgtttctccgcgccgcttactgaacttccttgaatctcgcggtatggcaccgattgcggaatttgcagacctttaattactagtaatggaaatatattaatgaacgagttttctatcctctgtcgtgtgctgggttcgctctattaccgccaaccacaagatcctttactggtgccgctgtttaccctgattcgtgaggggaaactggctgcgaactggccactggagcaggatgagttgctgacacgtttgcagaaaagctgtgatatgacgcaagtctctgccgattacaatgcgttgtttatcggcgatgaatgtgctgtgccgccatatcgtagcgcatgggttgagggcgcgacggaagcggaagtgcgcgcttttctttctgagcgagggatgccattagcggatacgccagccgatcacatcggcacattgctgctcgcagcttcctggctggaagatcagtcaacggaagatgagagcgaagcactggaaacactgttcagtgagtatctgttaccctggtgtggtgcgttccttggcaaagtggaggcccatgcaaccacgcctttctggcgcaccatggcaccgctaacccgcgatgccattagtgcaatgtgggacgagctggaagaagattctgaagaataagtgtgatctacgtcactcataactgcaacggataatttgttgttgcataaaatgtgtgctcgatctcattcatggccgcgttttctgctatcatgcgcggcatgaacatacttctctctattgcaatcacaacaggcattctctccggtatctggggatgggtggctgtttccctgggcttactaagctgggcgggcttcctgggctgtacggcctactttgcctgcccgcaaggtgggctgaaagggctggcgatctccgctgcaaccctgcttagtggcgtggtgtgggcgatggtcattatttacggtagtgcactggcaccacatctggaaattctcggttatgtcataaccggtattgtcgcgtttctgatgtgtattcaggccaaacagctgctgctttcatttgttccggggacgtttataggcgcatgcgcgacgtttgccgggcagggtgactggaaactggtgttaccttcgctggcgcttgggctgatatttggttacgcaatgaaaaacagtggcctgtggctggcggcgcgtagtgcaaagacggcgcaccgtgagcaggaaatcaaaaataaagcgtgaggggcactcacgctttcgcttaaacagtaaaatgccggatgataattccggcttttttatctgtcaggattccggtggaaccgacatatggcggtatttcaccagaatgtcattctgccgttctgctttattttgcaaatcccacagaccacggtcgataccatcattaatcaggaaaatgacccctgtttcgatagccgacatcaggcacagcataacaggttcgttcgaggtgtaacccacttccccttcaagcaagcgctggtagtcaataaagcggaaaaccccggcctgaacttcataggaaagtatcgtcttactggtgttcaccgaagaaaggatctcgccggtactcacattgacgacgcgcaggttcacggcaatctgatcgagctggtattgcgtgtcggcaccgatgccaaaatatcttgccccaaccccgccagatttgacgttgctttcataaccgataatcgaaccttcaaccatgatatttgccgccgttaaagattgcagcgggattcggttattaatggcaaccgtgccgttttcttgtgccgcacgaataatcttgcgctcgttaagcaggttttgtaagccctggcgctccagcggtataaaccagcgagaatctttcagtgccgtgaccagcattgccgtggcgctttgcggaacagcagtggagaagttacttgccgggtagggtttaaattgcccggtttcgtcctgaatgttgtataccgaaacaaagattttacccgtcggcgctggcagatgggtcaaatctttgtagctctgagcacgaggcattaatgtcggtctggcggcttctttaggcggggcggttaagcatccgctcagtaacatgacggcaaccaaaagaaataagcgctgcatgattattttccttatgaagctggggcttaaaaatcggttgagttattttgtaaacccgaaacctggatggtcgaggtttgtccggttttacgatctgtcacgttcaactgcaattgaccatcgcggttggcaatatcgacaatataatcgttggtcaccatgcggcccggtttaccggtattaatattcgacagtagcccacctaaaatttgtgactggatggcctgagtaaagttatctaacgctgagggtgtttcaataccaaagtcatcgttatagctcggatctttataagagttttgggcctgagcgctatttaataaaaaagcgccattatttgggttaccaccaaagtttggattacggaactggaaagtcatggttccagcccaacttaatggcgaaataagcatgagtagaactactgcatgtttgacacgcattgcagcctccgaacaattttttatttagaattcatcatgcgccaaatcgcccgtacttaataacgcctgatttatctggcgacgatttagtgcttcttcagtttgaatcagtgcaaagacgacagttttctcgaagtctcttttcaacggaaataaaaaagtctggaaaataacgtcctgattgaccgttatagtgatccagcttccccatcgtgcactgggcctttcattaatcgttaagttacccgtatagtcactttcccatttatcactaaaggctcggtaaaaatcatggccaatagatgaaacagtatggtcagttagcaatcccgggacttctacctcaacggcgtgaagattccctgcggcgaacagaaattctgccgccacaatccagcgtaaataacgtttcatggctttatcgcctgaggttatcgtttgcccaggaaaccgcttgtgtccggttttttacggctatcttcttgaaaagattataaagatgcgttttaaccgtattttcgctgatgaacaacgaacgagcgatctcgttattagacgcgccgatacgcagcttattcaggatctctttttcccgatgagtaaggagggctgattccgtgctgttataacgatagttacctgaatgcgtaatcaggtagctggcaagcttttgcgtaaagtagcattcgccgcgcaggacgccttgcaacccattgacaacacgttcttgatcctccatggaataaaaaacgccgttgatatgaggccagttttcaatgtcgcggtacgggtaatcttcaggcgtatttagcaacaatattttgatattgttgtttttcctgctcaaagtatcctgccaataatggataagctttttatccgcttccatcatatccagaagaataatagagcctgaagagatatcgtccagagaacgttgaatattatgtaattttcctgtaattgccagcgattgtttaaggtgctgcaagagagctgtcgcctgcaaagaagatttagtgatcaacaataatgtatgaccatgaatactatggacttcattaaacatgatgaaaccccgctttttttattgatcgcacacctgacagctgcctctaaaatagaagcaccagaagtactgacagatgttgcactgctgtgtgtagtaataaatcagccctaaatgggtaaaatataaaactaatggattacatctgatttcaatctagccattacaaatcttaaatcaagtgttaaacatgtaactaaatgtaactcgttatattaaaatgttaaccttaaggttttattaagtttagaaatgatagaaaagttgtacatttggtttttattgcacaattttaaaaaatcatacaaatggtgataacttactaataatgcatataaaaaatatttcggtgtagtcctttcgtcatgtaaaacgttcttgttttttctccacacctccgtggacaattttttactgcaaaaagacgaggtttgtcacggcttgtgcgcaagacatatcgcagcaatcagcgacgggcaagaagaatgactgtctggtgctttttgatagcggaaaacggagatttaaaagaaaacaaaatatttttttgcgtagataacagcgtatttacgtgggttttaatactttggtatgaactaaaaaagaaaaatacaacgcgcgggtgagttattaaaaatatttccgcagacatactttccatcgtaacgcagcgttaacaaaatacaggttgcgttaacaaccaagttgaaatgatttaatttcttaaatgtacgaccaggtccagggtgacaacatgaaaaacaaattgttatttatgatgttaacaatactgggtgcgcctgggattgcagccgcagcaggttatgatttagctaattcagaatataacttcgcggtaaatgaattgagtaagtcttcatttaatcaggcagccataattggtcaagctgggactaataatagtgctcagttacggcagggaggctcaaaacttttggcggttgttgcgcaagaaggtagtagcaaccgggcaaagattgaccagacaggagattataaccttgcatatattgatcaggcgggcagtgccaacgatgccagtatttcgcaaggtgcttatggtaatactgcgatgattatccagaaaggttctggtaataaagcaaatattacacagtatggtactcaaaaaacggcaattgtagtgcagagacagtcgcaaatggctattcgcgtgacacaacgttaatttccattcgacttttaaatcaatccgatgggggttttacatgaaacttttaaaagtagcagcaattgcagcaatcgtattctccggtagcgctctggcaggtgttgttcctcagtacggcggcggcggtaaccacggtggtggcggtaataatagcggcccaaattctgagctgaacatttaccagtacggtggcggtaactctgcacttgctctgcaaactgatgcccgtaactctgacttgactattacccagcatggcggcggtaatggtgcagatgttggtcagggctcagatgacagctcaatcgatctgacccaacgtggcttcggtaacagcgctactcttgatcagtggaacggcaaaaattctgaaatgacggttaaacagttcggtggtggcaacggtgctgcagttgaccagactgcatctaactcctccgtcaacgtgactcaggttggctttggtaacaacgcgaccgctcatcagtactaatacatcatttgtattacagaaacagggcgcaagccctgttttttttcgggagaagaatatgaatacgttattactccttgcggcactttccagtcagataacctttaatacgacccagcaaggggatgtgtataccattattcctgaagtcactcttactcaatcttgtctgtgcagagtacaaatattgtccctgcgcgaaggcagttcagggcaaagtcagacgaagcaagaaaagaccctttcattgcctgctaatcaacccattgctttgacgaagttgagtttaaatatttccccggacgatcgggtgaaaatagttgttactgtttctgatggacagtcacttcatttatcacaacaatggccgccctcttcagaaaagtcttaatttgttgaaatatcgagcataagatgaatctggagagaatggtctgctgcgaatcagccaacctgaaagtatggataacacaacccttggatttgcccctatatttccagacatctgttatcacttaacccattacaagcccgctgccgcagatattcccgtggcgagcgataacccagcgcactatgcggatgccattcgttataatgctcgaacgcctctgcaaggttctttgctgccgttaacccgtctggtttgggcatgatactgatgtagtcacgctttatcgttttcacgaagctctctgctattccgttactctccggactccgcaccgccgtgttcttcggttcaagtcccaacatccgggcgaactggcgtgtttcattagcccggtagcatgaaccattatccgtcagccactccactggagacgacggaagatcgttgccgaagcggcgttccaccgctcccagcatgacgtcctgtactgtttcactgttgaagccgccggtagtgaccgcccagtgcagtgcctcacgatcacagcagtccagcgcgaacgtgacacgcagtctctctccgttatcacagcagaactcgaacccgtcagagcaccatcgctgattgctttctttcacggccactctgcctgtatgtgcccgtttcgatggcggtacagcaggttttcgctcaagcaacagcgcattctggcgcatgatccggtaaacacgtttggcattgatcgcaggcataccatcaagttctgcctgtctgcgaagcagcgcccatacccgacgataaccatacgttggcagctctccgataacatggtgtatacggagaagcacatccgtatcatcagtgtgacgactgcggcggccatccatccagtcatcggttcgtctgagaatgacgtgcaactgcgcacgcgacacccggagacaacggctgactaagcttactccccatccccgggcaataagggcgcgtgcgctatccacttttttgcccgtccatattcaacggcttctttgaggagttcattttccatcgttttcttgccgagcaggcgctggagttctttaatctgcttcatggcggcagcaagttcagaggcaggaacaacctgttctccggcggcgacagcagtaagacttccttcctggtattgcttacgccagagaaataactggctggctgctacaccatgttgccgggcaacgagggagaccgtcatccccggttcaaagctctgctgaacaattgcgatcttttcctgtgtggtacgccgtctgcgtttctccggccctaagacatcaatcatctgttctccaatgactagtctaaaaactagtattaagactatcacttatttaagtgatattggttgtctggagattcagggggccagtctaaccctcaaggatgactaatcattgaggaaatagaataaatgttcagaccttttttaaactctcttatgctcggcagtttgttttttccttttattgccattgctggaagcaccgtgcaagggggcgtgatccatttttatggccaaattgtggaaccggcatgtgacgtcagcacccagtcatcacccgtagaaatgaactgcccacagaatggttctattccgggcaaaacctactccagcaaagcgttaatgagcggcaatgtcaaaaacgcgcaaatagcctcagtaaaagtgcagtatcttgataaacagaaaaagctggctgtaatgaacatcgaatataactaagtttctgaacaactcacgttgctgagcagaaaaatgcgatttaaccaaaaagcctgctgtacacttaagaaacaagaaggtgtaaggaggcgttatgaaaacgcgtattcatgttgtgcagggtgatattaccaaactggccgttgatgtgattgtgaatgcggctaatccgtcattaatgggaggcggcggcgtcgatggggccattcatcgcgcagcgggtccggccctgctggatgcttgtttaaaagtcaggcaacagcagggcgattgccctacggggcatgccgttattacgcttgcaggcgatcttcccgctaaagccgtagtgcacaccgtcgggccagtctggcgtggtggtgaacaaaacgaagaccagcttttgcaggatgcctatctcaatagcctacgactggtggcggcaaacagctatacgtcagtggcttttcctgcaatcagtactggggtttatggttaccctcgtgcggcagcggctgaaatcgcagtaaaaaccgtttcagaatttattacccgtcacgctttacccgaacaggtatactttgtctgttatgatgaagaaaacgcccacctctacgaaagactccttacccaacaaggagatgaatgatttgccccggctggcgagcgcggtgctgccactgtgttcgcaacatcccggtcagtgtggcctttttcctctggagaaaagtctggatgcgtttgccgcccggtatcgtctggccgaaatggcagagcatacgctcgatgttcagtattacatctggcaggacgatatgtcgggtcggttactgttttccgccctgttagccgcagcaaagcgtggcgttcgcgtccgtttgttgctggacgacaacaatacgcccggacttgacgacattttacgcttgcttgacagtcatccacgcattgaagtccggctttttaatcctttctcgtttcgcttgctgcgtccgcttggttatatcaccgacttttcccgtcttaatcgccgtatgcacaataaaagtttcactgtcgatggcgtggtgaccctggtgggaggacgaaatattggtgatgcctattttggagcaggggaggagccacttttttcggatttagatgtcatggcaataggacccgtggtagaggacgttgccgatgatttcgcccgctactggtattgcaaatcggtttcacccttacagcaggtgctggatgtcccggagggtgaaatggcggatcgcatcgagttacccgcctcctggcataacgatgccatgacgcatcgttatttacgcaaaatggaatccagtccatttataaatcatctggttgatggaacattgccgcttatctgggcgaagacacgtttattaagtgatgatccggcgaaaggggagggcaaggcaaaacggcattcactgttaccgcagcgcctgttcgatatcatgggctcacccagtgaacgcatcgatattatctcttcctattttgtaccgacacgcgcaggtgtggcgcaactcttacggatggtgagaaaaggggtaaagattgcgatcctaaccaattctcttgccgctaacgatgttgctgtcgtccatgccggatacgcgcgctggcgcaaaaaattgctccgctatggcgtggaattatatgaactcaagccgacgcgtgaacaaagtagtacgttacacgatcgcggcataaccggtaattccggagccagcctgcatgctaaaacctttagcatcgatggtaaaacggtgtttatcggctctttcaatttcgatccgcgttcaacattgctcaatactgaaatgggcttcgtgatagagagcgaaacgctggcacagttaattgataaacgctttattcagagccagtatgatgcggcctggcagctccgtctggacaggtggggacggatcaactgggttgatcgtcatgcaaagaaagagattattctcaaaaaagaacccgccaccagtttctggaagcgggttatggtcagactggcgtcgatattgcccgtggaatggttattgtaaatgtggcttaacgggctggtgctttatcgttctcacgcttaacaaccggtttaccagagaacaaaaacttcagtaacgggatgcgcaaatgaatttcatacagaattatcgcaatccctactacaaatatcaggccacagagaaaaccaagccagttggaggtgatgtgcggtgtaatgtatgcgccgaaaaacagcgttaacgggtggtgaaccagatagataaacagcgatgcgttaacaaaataagtcacccgcgctgactggaagttaagcaaacggtggccaaaggagaagaccacattcaccatccacagaccgaggaccatggtgatcaccgactcggtttcgtacatccaggcatcgccactgccatagcgctggttgagtaaataagcgacaaacgccaatgctgctgcaagggtacagccacgagacggcgtggtaaacaaggctttaagatgagggaaaatgaaagccagtgcgccgaggataaagaacggcaaataaaacagcgtttgcatgacaataaaattgaacatgccattactcagaatgggcggatacacaataaaaatcgttcttcttattaccgcataaccgatgccgaggcataaaaaaatcaccgatagttttaccatcgagaattttttattcgttttatcagaattttctaaattatttctgatgcgcttaaatatccatacgcacagcgtcgtcatgaccactaacaccagtaaaaaccacaggtgtgatattaattcccaggccaacgtattatatttgtcatacaatgacagcccaggccaactttccgcttttcctttgacatattgcagcataataaattgcggtaatgtcagtagggggatggctgttaacatcgggatacctacacgttcgacacgtactttccaccattttttcaagggatagcgtaaaaaaagcatgtaggaaaagtagccggatataacgaaaaatacctgcatgcggaacgagtggatgaagtcattaaaaagggtcagccacaatgatgattcggcgctattcacatgccatgtatggctcgaatagattaaagaaatatgaaaaggtatccctaacaacatcagccaggcgcggatggagtcgaggaaatattcacgttgcgcgggtactgggttcatatatggttaactaatctcggatttttcgtcttatccctgtcgggttatgcctttaggcttgttgccatagtgacaccgacctgaccgcgccaggcgcaggcttcaaggtttttatgcatagcatcatcgctaccactaaccagaatggaagcgtctgtaagacggttgataaataaatttgctggcaaaccctacacgaagtcgatgcttctgtctttaggagaagcacggaaagtgaaaacggttgcaatcaggtgcttaatccatgagccagcgtgctgaacgataccgggattctgttgtcggaatggctggttatccattaaaatagatcggatcgatataagcacacaaagggggaagtgcttactaattatgaaacataaactacaaatgatgaaaatgcgttggttgagtgctgcagtaatgttaaccctgtatacatcttcaagctgggctttcagtattgatgatgtcgcaaagcaagctcaatctttagccgggaaaggctacgagacgcccaaaagcaacttgccctccgttttccgcgatatgaaatacgcggactatcagcagatccagtttaatcatgacaaagcgtactggaacaatctgaagaccccattcaaactcgagttctaccatcagggtatgtacttcgataccccggtcaaaataaatgaagtgactgccaccgcagtcaaacgaatcaaatacagcccggattatttcactttcggcgatgttcagcatgacaaagatacggtaaaagaccttggctttgccggttttaaagtgctttacccgatcaacagcaaagataaaaacgatgaaatcgtcagcatgctcggggccagctatttccgcgtgattggtgcaggtcaggtttatggcctttctgcccgcggcctggcaattgataccgccttgccatcgggtgaagaatttccgcgcttcaaagagttctggatcgagcgtccaaaaccgactgataaacgtttaaccatctatgcattgcttgactcgccgcgtgcgacaggtgcttacaaattcgtggttatgccagggcgtgacacggttgtggatgtgcagtcgaaaatctatctgcgcgataaagtcggcaaactgggggttgcaccgttaaccagtatgttcctgtttgggccgaaccaaccgtcgcctgcaaataactatcgtccggagttgcacgactctaacggtctctctatccatgccggtaatggcgaatggatctggcgtccgttgaataacccgaaacatttagcggtcagcagcttctccatggaaaacccgcaaggctttggtctgttgcagcgcggtcgtgatttctcccgctttgaagatctcgatgatcgttacgatctccgtccaagcgcatgggtgactccgaaaggggagtggggtaaaggcagcgttgagctggtggaaattccaaccaacgatgaaaccaacgataacatcgtcgcttactggacgccggatcagctgccggagccgggtaaagagatgaactttaaatacaccatcaccttcagccgtgatgaagacaaactgcatgcgccagataacgcatgggtgcaacaaacgcgtcgttcaacgggggatgtgaagcagtcgaacctgattcgccagcctgacggtactatcgcctttgtggtcgattttaccggcgcagagatgaaaaaactgccagaggataccccggtcacagcgcaaaccagcattggtgataatggtgagatagttgaaagcacggtgcgctataacccggttaccaaaggctggcgtctggtgatgcgtgtgaaagtgaaagatgccaagaaaaccactgaaatgcgtgctgcgctggtgaatgccgatcagacgttgagtgaaacctggagctaccagttacctgccaatgaataagacaactgagtacattgacgcaatgcccatcgccgcaagcgagaaagcggcattgccgaagactgatatccgcgccgttcatcaggcgctggatgccgaacaccgcacctgggcgcgggaggatgattccccgcaaggctcggtaaaggcgcgtctggaacaagcctggccagattcacttgctgatggacagttaattaaagacgacgaagggcgcgatcagctgaaggcgatgccagaagcaaaacgctcctcgatgtttcccgacccgtggcgtaccaacccggtaggccgtttctgggatcgcctgcgtggacgcgatgtcacgccgcgctatctggctcgtttgaccaaagaagagcaggagagcgagcaaaagtggcgtaccgtcggtaccatccgccgttacattctgttgatcctgacgctcgcgcaaactgtcgtcgcgacctggtatatgaagaccattcttccttatcagggttgggcgctgattaatcctatggatatggttggtcaggatttgtgggtttcctttatgcagcttctgccttatatgctgcaaaccggtatcctgatcctctttgcggtactgttctgttgggtgtccgccggattctggacggcgttaatgggcttcctgcaactgcttattggtcgcgataaatacagtatatctgcgtcaacagttggcgatgaaccattaaacccggagcatcgcacggcgttgatcatgcctatctgtaacgaagacgtgaaccgtgtttttgctggcctgcgtgcaacgtgggaatcagtaaaagccaccgggaatgccaaacactttgatgtctacattcttagtgacagttataacccggatatctgcgtcgcagagcaaaaagcctggatggagcttatcgctgaagtcggtggcgaaggtcagattttctatcgccgccgccgtcgccgcgtgaagcgtaaaagcggtaatatcgatgacttctgccgtcgctggggcagccagtacagctacatggtggtgctggatgctgactcggtaatgaccggtgattgtttgtgcgggctggtgcgcctgatggaagccaacccgaacgccgggatcattcagtcgtcgccgaaagcgtccggtatggatacgctgtatgcgcgctgtcagcagttcgcgacccgcgtgtatgggccactgtttacagccggtttgcacttctggcaacttggcgagtcgcactactggggacataacgcgattatccgcgtgaaaccgtttatcgagcactgcgcactggctccgctgccgggcgaaggttcctttgccggttcaatcctgtcacatgacttcgtggaagcggcgttgatgcgccgtgcaggttggggggtctggattgcttacgatctcccgggttcttatgaagaattgccgcctaacttgcttgatgagctaaaacgtgaccgccgatggtgccacggtaacctgatgaacttccgtctgttcctggtgaagggtatgcacccggttcaccgtgcggtgttcctgacgggcgtgatgtcttatctctccgctccgctgtggtttatgttcctcgcgctctctactgcattgcaggtagtgcatgcgttgaccgaaccgcaatacttcctgcaaccacggcagttgttcccagtgtggccgcagtggcgtcctgagctggcgattgcactttttgcttcgaccatggtgctgttgttcctgccgaagttattgagcattttgcttatctggtgcaaaggaacgaaagaatacggcggcttctggcgcgttacattatcgttgctgctggaagtgcttttttccgtgctgctggctccggtacgcatgctgttccatacggtcttcgttgtcagcgcgttccttggctgggaagtggtgtggaattcaccgcagcgtgatgatgactccacttcctggggtgaagcgttcaaacgccacggctcacagctgctgttagggttagtgtgggctgttgggatggcgtggctggatctgcgtttcctgttctggctggcaccgattgtcttctcgttgatcctgtcaccgtttgtttcggtgatttccagccgtgccaccgttggtctgcgcaccaaacgctggaaactgttcctgatcccggaagagtattcgccgccgcaggtgctggttgataccgatcggttccttgagatgaatcgtcaacgctcccttgatgatggctttatgcacgcagtgtttaacccgtcatttaacgctctggcaaccgcaatggcgaccgcgcgtcaccgcgccagtaaggtgctggaaatcgcccgtgaccgccacgttgaacaggcgctgaacgagacgccagagaagctgaatcgcgatcgtcgcctggtgctgctaagcgatccggtgacgatggcccgtctgcatttccgtgtctggaattccccggagagatattcttcatgggtgagttattacgaagggataaagctcaatccactggcattgcgtaaaccggatgcggcttcgcaataaaaacgtagttgcctgatgcgctacgcttatcaggcctacatcgttcctgcaatttattgattttgcaagactttgtgggtcggataaggcgttcacgccgcatccggcaaaaacaacgagccaataaaaataccggcgttatgccggtatttttttacgaaagaggtatcaaatgcgtttaattgtggtgagcatcatggtgaccttgctgagtggctgtggcagcattattagtcgcactataccggggcaggggcatggcaaccaatattatcccggtgtgcaatgggatgtgcgtgactccgcctggcgttatgtcacgatccttgatctgccattctctctggtttttgatactttactgctgccgatcgacattcatcatggcccgtatgagtgattaacgttcatcccactcatcagctgctgcgcgtccttcctcggtatccagcggtggctcaagctgaaattccccctcgtcccattcatgtaatgtattctcttcctgccactcctggcgtatctctatctcatcatagtcgccatcaaaaacactttgcgcggcttcaccgctaagcataggtaaacattcaccttcttccccttcgtcggcaaaaaactcaacttgccacatgatgtcgccgtcctgcaaaacgtatttttgggcattgaactgttgcacattcgcatcttcggcgtcgatgccggggttgtctgcaagaaattcttcgcgtgcagcgtcaatggcttcttcaagcgttgcgtacatggtcatcacgattctccctttgagttgatgaggtttcagggaaaaggatagctgattctccgcttttgcaagtatgaaaggcgaaaaatcagttcgatacctggggtattcgacgacgacgtagactgttccatgaatagactgcgttgaataacactacgccagcggtgacgagaaataccgctctgaaaccgtagttcgctgaaatcgctgctcccatcaatggtccggtaacgttgccaatatcacgaaacgattggttatagctgaagatacgcccggcgatctggttgctcgagttgtaaaccaacagtgtctgtacggcggggagtagtgcaccatcggcggcaccgagcaaaaaacgtaaaatcccaagttgcaatggcgtctgaacgtaagacattgggatcaacagcagtacagaaaagatcagcgctgtaatcaggatcttttcgggtccgattcgatcgccaagtttgccgagtcgtggtgcacttagcagagccgccacgcctggcaccgaggcgatcatgccactgataaaggcgacgttactgacgttacccgccagttcgcggacatacagcgtcagaatgggggcaattgagcccgtcgccacctggatgattaacgtagtgacaaacaggctgagtaccagtttcgggtttttaagtgatgtcaccacttcccgcatgtgcagcatctcttttttgctgaccggctggaatttttctctgatgcaaaacagggtgacgaaaaagcagagtatgagcacactggcggtaataaagaataccggacgtaagccgtagctatcggcgagcaggccgccagccattgggccgagcaacgcaccactaacgccgcctgtggagagcgtacccagcgcccagccgcttttattacgcggtacttgtgtggcgataagagcattagcgttggggacaaatccgccaagtaacccaagaagcgcccgcaggatcaaaaactgccagatattttgtgccagccccatcaacaccatcacgatgcccatgccgagggcagagcgtaatagcatgagttttcggcctttacggtcggcgagtccaccccaaaacggtgaggcgatggccgaaaataaaaatgtaatgctgaagacaataccggaccacatattcagggcggagtgaccggtaacgccaagctgctcaacgtagaggggtaagaagggcattaccagactgaaggcggcaccggtaagaaaacagcctagccaggcgacgatcaggtttcgtttccagtttataggggtgtcattttcacagggtgacatagcaatccgctgttggtgcgccaggcgcggtgaacataagaagaaaagataagcacactaattatgcgcccgacttccagggggcgcaatccagagagcttttatcgctaaatcagggggatttgctgtggtaatgccggatgccattctgaagcatccggcatgggagatttaatagcgtgaaggaacgccttccgggcgtgttttaaagcgacggtgtaaccacatatactgctctggtgccatcatgatgcatttttcgaccactttgttcatccacgcggcggtagtttcggcatcatccagtggcggagaacactctggcggcagcataatcaattgataccctttgccatctggcttacggcgtggaacgaagggcaccagacatgcgccggacatccgtgccagcatccaggttccggtcgtggtcgcagcctgctcaacggcaaacaacgggacgaaaacgcttgagcgcgggccgtaatcatgatccggtgcgtaccagaccacttcgccttttttcagggctttaatcatgccttttaaatctttgcggtcgagcatcgatttatttgagcgcaaacggccccaggtttgtagccagtcaatcagtggattatcgttcgggcgataaacgccaatacccggttcctgcataccaaactgccgcgcacccagctccagtgtcagaaaatggatgccaactaacaggatgccgcgtttttgcgcctgcacgtcacgaatgtgttccatgccgatcacttccgtccagcgggcgattcggcggtccggccagaaccacgccatgccggtttccatcaggcccatgccaacggattcgaaattcttcaccaccattttacggcgttcttgttcgctcatttccgggaagcacagttccaggttgcgatgcacaatttttgcgcgtcgtttcataaaacgtaacgccagttttcctaatccacaaccgaggcggtagataaccgggtagggcaattgcacgactaaccaaagtacgccaatacccaaccaggttaaccaataacgcggatgaagcagtgcggtggagaacttgggtagattcgtcatatcaatcctgtttttcaacctattcgggcaattgtatgtattgtcgcattttttcgcccgcaaccaaaatttgtggctgaagactgggcgaaattgccgcgcttgtaaataacaaataatttttaatgcgcaaatgtagcgtaaaatgtgtggatgttaattatcgataattgctatatcatgccgcggatttttactttcccatctcgcaggaaccgtacaccatgccagtgttacacaaccgcatttccaacgacgcgctaaaagccaaaatgttggctgagagcgaaccgcgaaccaccatttcgttttacaagtatttccacatcgccgatcctaaggcgacccgtgacgctttatatcagctgtttaccgcgctgaatgtttttgggcgagtgtatctggcgcatgagggcattaacgcgcaaatcagcgtacctgcgagcaatgttgaaacatttcgcgcgcagctctatgccttcgacccggctttagagggtttacgcctgaatatcgcgttggatgatgacgggaaatccttctgggtactgcgcatgaaggtacgcgatcgcattgttgccgacggtattgacgatcctcactttgatgccagcaatgttggtgagtatctgcaagcggcggaagtgaacgccatgcttgacgatcccgatgcactatttatcgacatgcgtaaccactatgagtatgaagtggggcactttgaaaacgcgctcgaaattccggcagataccttccgtgagcagctgccaaaagcagtcgagatgatgcaggcacataaagataaaaaaatcgtcatgtactgcaccggcggcattcgttgtgaaaaggccagtgcctggatgaaacataacggattcaacaaagtctggcatatcgagggcggaattattgaatacgcccgtaaggcgcgcgagcagggcttgccggtgcgttttattggcaaaaattttgtttttgacgagcggatgggcgaacgtatatcggatgagattatcgcgcattgccaccagtgcggcgcgccgtgcgacagccataccaactgtaaaaatgatggctgccacctgctgtttattcagtgtccagtatgcgcggaaaaatacaaaggttgttgtagtgagatttgctgcgaagaaagcgcgttaccgccagaagaacagcgacgccgtcgggcaggacgtgaaaatggcaataagatctttaataagtctcgtggacgtctgaatacaacactgtgcattcctgatccaacagaataaatatcattgccggatgcgtgccatccggcaacatttcacgcttacttctgctgtacgccttccactgaaataatcagatccacttcctgagaagctggacctaaatctgtcttgatattgaagtccttgagcttaattttgccttcggcctcgaagcctgcacgtttaccaccccatgggtcgtcgccctgaccaattaatttcgcttccagcgtgacgggtttggttacgccattcagcgtcagatcgccggtaatatccagttcgtcaccgtctttcttcacgctggtggaggtgaatgttgcctgtggatattttgcggtattgaggaaatctgcactgcgaagatgtttatcgcgttcggcgtgattagtatcgacgctggtggtgttaattgtcacattcactttatcggcagccggatttttttcgtcaaaggtaaaagtaccgtcgaaatctttaaaggtgccgtataaccagctatagccaaggtgctggatgcggaaattaacaaaggcgtgctgaccttctttgtcaattttgtaatcggcggcaaccgctgaaccggcagagaacatcagggacgcgaaggttaaaccaagcaggctttttttcattttttatactccatagtcagatgacgactttcccagcatgcgcttcagagtgtcgtctttatcgatgaaatgatgcttcagggccataaatccgtgcataacggacagtactacgacgctccacgcgagccaaaaatgcagggcaccggcaaagtctgcctgtgcgccagcgtcggcaagggtcgcggggacgtcaaaccagccaaaaacgctgatcggtttaccatcggcagttgagatcagatagccgctgatgccgatggcgaaaagcaataggtacaatgcgagatgtccagctcttgcggcaagacgagtcatgggcgaataactcggcagcggacccggcggtggagatatgacacgccacagaacgcgaataaccagccccatcattaacaaaataccgatgcttttatgcagttcgggtgctttgtgataccagccatcgtaataactgagcgtgaccatccacagacctaaagcaaacatgccgtagacaataattgcgcttagccaatggaaggccgcagatataacaccatagcgttcaggggtatttgtgaatgacataagtgcatccaaaacgaatttgcgagagaaagaaaatggcgtgtcggagaatgaattgcaacacaaaaataacaaattgaatgatatttatttttatttcaataattttgaattaataatgaaagaatcttcataagtttagtgggttcagcatcagagatgtctggtgagtgctgtagaagcaggaataatctcattcaatttttcacgctaaatgaaagggagattaaatatttgtcagtttatgtcagtgcggaaaactaaaaataaaacacatagatcagatccataattgccaacaatccccagagaaaaagataaagcatcagatgctcgcgaatattattgatgagatagtgcaacagccgacgcattaaatactcctgtaaaaacggcctcattctggaggccgtaatgatgattattggaagcgggaaagcctgaatggcgtcaaatcaaaatcgctttttttgtcttgcgcaaaatcggcagctatttcccctaaaactgacgcaaatttaaaaccgtgcccactcaggccggtaatgagcagtgtattatcgtggccgggtagggtatcgataataaaatcttcgtcaggcgaattatcataggtgcaggcagcgccgtacaggcagcaaccgatacccggcaatacattgcgcaagaacgggaaggcttctgacccatcactggccacttccgcaaacggaacacgttcatccgctgaatggataacctggcctccgttatgtttgccaatcttcaacgcgtcgttttctgccggaaaaccataatattgatcgccattgggcagttcaccggtaaacgccgggaatttattcttcacgctatagcggccatcggcctgataccaggcaaatactttgcgtacgggctggacaggcagctccgggagcaggtcttttacccatgttcccgcgcagacaatcgcttttttcgcctgatactcaccgtcagccgtttcaatagttacgccatcatcgtcatgacgaattgcggtgaccgggcagttgaacagttgcgcacagcccgcttccttcgccagttggatccaggttttaatcgccagttcgctgcgcaaaaaaccggaatcagtttcaaataagccgatgtagttgtccgggacgcgtatttccggccagcgggccataatcccttgcgcatcgagcttttcaacgttgagttgccattgttcggcgctgtgggcgacgttggcgagaaatgtggaatcagccgggccaaggttaatgacgccagagcgtacaaaaatgggatcttcttcgttgtggcgggagagttcatcccacagcgtttgcgcgcggaggaccagcgggacatacttttcgccttcaccataagcatggcgaattaatcgcgtatcgccgtggtggctgccgtgttgatgcggtggcatatgggcgtcggtcattagcacgtttaaaccggcgcgggttgcataatacccggcggcagcgcctacggaaccgctgccaataatgatgagatcgtatttcatttttttctctctgctctcatggtttaagcagagtaattaactgaatgcagatatacaacccagaaatggtaaaggcaccggtgaggtgccttttgggtggatggtcatgtcatgttaatgacgccgatactcgtttacctggaaatcaccggattcaattttggcgattcctgcttctaatatcgaaataaattgtctggcaacatcagtggttaaccagagcgtctgaccaacttcagtcccttcctgctcggacttatttggggtctggtagtgcaaacgcaacatcagcgcatcatagctatcaacggtgctgatgtcccaccctacgagcggatgagtctgaatgacttcattatttttttccatcatggccccctaattcgtgttactagacaacgttattcgaggttcaatgcgtttttatctgaagcaacttcagtataccaataagtaagggtattcaccgaatttttaaagggggaaacagataaatttctgcttttaagatttatatgaacaataaaacagcatgtcattcatatttttttagcatattgtgcaattattttgaggaagtgtagaaattttgtactcaaaattcgtaagtaaaataaaaaagccggggcgacccggcaaaaaaaatcactgcatattattcgctgacaaaccagtcatcggcgctttcccacgtttcctggagaatttcactaatgcgctgtttatcttcttttgtcgcgccaataaccgataaattattcgctgcggcataacgtaccgatacgtggccttcattatcaggaaacgcatactgaatacggcgggaaagttcgccagccagggcgtcaatagccccagctggcaatggagaagttttcgctatggtgacttcaattcgcataatagccccctgttgaatatactggttatttatacaggtaaaataacctaatgacaacaggaagctacgatttttattgtttaacggaccagcgtaccgtttccccggcgaggaatggcaccagcgtgtcatcagtcagtgcgatgctttcagcaacctgttgctcttcacgtaccagttcgatgaatgtgtcgttgaccggcaacccatagaactgcgggccgtttacagaacagaatgcttcaaagtgctgcaaagcattcatttcttcaaagacggtagcgtaactgcccagcgcggttggggcgttgaagcagcccgcgcagccgcaactgctctctttgcgatgacgtgcatgtggcgcagaatccgtaccgaggaatactcgattaaaaccgctggcgaccagttcacgcaatgcctgttggtgaatattacgtttgaggatgggtagacaatacaggtgcggacgcacgcctccaaccagcatatggttgcggttaaacatcagatgctgcggagtgatggtggcagccagccgttcatttccgtcacggacatagtcggcagcatctttggtggtgatgtgctcaaaaacgactttcagcgcagtcaggcgctggcgcagaggttccatcacgctttctataaagcgcgcttcacgatcaaaaatgtcgatatctgcatgtgtcacttcaccatgcaccagtagcggcataccgattttttccatgcgctcaagtaccggcatgattgcgtcaattgacgtcacgccgtggctggagttagtggttgcgtttgccgggtaaagttttgcagcggtgaacacgccttcgttaaatccgcgctccagctcattaggatccagcgaatctgttaaataacaggtcatcaatggggtgaaatcgtgcccggcaggtacggcgtcaagaatacgctggcgatacgccacggcagcctcaacggtggtcacgggcggagccagattgggcattacgatagcccgtccataaatttcgctggtatatggcacgacagtttttaacatgtcgccatcgcggaggtgaaggtgccagtcgtctgggcggcggatctttaatacctgggatggtgcagtcattaatctctatgctccggctgaagggatgtttttgccggacacaaaggataagcggaaacgttttcctttgcacgaaaaataaagggcgcgaatgcgccctcgtgattaatcagtaaatggaatgacaatttcgcctggcttcacttcaatgcctttcgccagttttttcgccattgcttcgccctggctgccatcttcgcgcaggacgtaagcaggttgctggttaaagtaattgcgtaatgcctggttcaaatagggaagcaacgtttgcatcaccgtttgcattttttccggttgtaccgtcgcatcgaccacttccatctctttcaggaagatcgcacctttttctttatcaaacacgggcagcgctttcagcttcagtttcatggtcgctttctgactaccgaacagggagttcatgtccagattggcgtctccggttagggtaaccttattcggctcttcgcgaccaatttggctggtcaggtttgtcagaacaatatgggcgtcagccacgccgggtaaaccgatatcttttgagaaattattatgtttcgcaagcgactggttaatttcttgttcggtgatggtgtattgggtgagttgattacagccaacgagcaggccactgacgatcaatgcagcggcaaataaaaacttgttcatggtagtcctcgacatgaaatctgcgtcaatatcctgacacaacgcagcatgtgtcaccagcgataaactcgccagcagaaaaaactgaaaacggcggcaacccgcgaatacaggctgccgcggcgggtcaggattaaatcgccattgatgataacaaattgatttgtgtctgtttcgccatattatcgcggtaatcagcaacgcggcttggccagttaattccggctaccagcgtcagattacgcagtagcgggaatagctgaatatcatcttccgaaagttcgccattcacggcgttcggtttgacgatcagtttgtccagcgcacgtaaatcatcgctgatattcttaatcagaccgtcagagtgggccagcaggtcggcaaaattacccgcgctggcctctttcttgtcgacgaaatatttgcgcgcggcgggagtagaaaactcatcaaatgccgatttggcaaaacgcggcaacagcagtttgttggcgtagccattgaccttgcgcagccactcttcaatggcaggggaacgtttgccggtcagtaacggtttgccgtcgagtttatcgacatagtgaacgatgtccatgctttctggcatatagcggctgtcatctttttgcagaatgggaacctgtttttgaccgaccatccgggtgggtgtttctgcgtcgtcgttgagcagaacatgtaattcgacggggatatttttcaggccgaaaatcatgcgggctttgaggcagtaagggcagtgatcgtaaatgtatagcttcacgtgactcctccatttggctgtcagttcactttcagtatgaaggagtcaggggggagtatcaaatcaggcgtcgcgttcaagcaaacgacgcgcggcgcgtttctggctaaactgccaacccagcgcaaggaaagtgaagatgccaataatgcccagcatcatccacggaagctctggctggtgcgccgatttgcccaggtcaaacagccagccgccaccgatataaccaatagcgccgccaatcgccagacccagacggctaaaccccatatagctgccgcgagctcttgcgtccgccagcgaagcacttaaggtttcacgcgcaggctcggcaatgatcgacccgatataaaacagacaaatcagggtgaaaagttgttgcaggccgctgaccatgcccaccggcatcatgcttaatgacattatcaacagcccagccatcaaccggtgttccagacgaaaatgcttttcactccagcgggcgatagggtagagcaacgttaacgacagacacgcttcaatggcatacatccatttaacggcagagggcgcgccagccacgtcgttgaccataattggcagcatcagcatcacttgtacagccagcatgtagtaacccgccagcgtcagaacataggtgacaaaacgcttgtcacgcatcacgcgggtcatgccttcgcgaacgggcgtgcgtacggtggagagtttccatgctggtaacaaccacgcattgaacgccgcacatagcacaaatagaactgcccctgtggcgcagaccaggcgaaagtcgtattgcaacagccagctccccaacaatgcgccaatgaccgcaccggcactgtcctgcatcatcaacagcgagaaaaaacgaccacgctgctgtggacggattaatttcaccaccagcgccgaacgcggcggatcaaacaacgtgccaccgagtcccgagagcaggcatgaaaaccacaatagccacggttcgtgggcgatacccattgtggcgaatccggcggcgcgcatcagcataccggtaacaatcatcggtttggcaccaaagcggtcggcaattgcaccgccgaaaatacccagaccttgctgaataaattggcgtagaccgagagcaataccgaccatgacggcggcccagcccatttgatcaacgaagcggatagagatcagcgggaagacaacaaagaaccccagcacgaccagcatattatcgatgagcaggaaatatttacccaggttcctcgcctgcgacacgcgggacatttcccctcccgggaaataaaagatgagcactttctattctgcattgccgctaagacttttcccatcacttcggggacaatatttttttatcaaaacgtcgctttgatagagagtttttatcaaatatgtgaataatgcagaaaatggcattttggacttttcacagggtctggttgcgcaggtatagtaatacttacagcgtattaaagacgttacgggaaggagtaggtatagaatgtttggctatcgcagtaacgtgccaaaagtgcgcttaaccacagaccgactggtcgtgcgtctggtgcatgatcgtgatgcctggcgtcttgcggattattacgcagagaatcgccatttcctcaagccctgggagccagtgcgcgacgaaagccactgttatccatcaggctggcaggccaggctggggatgattaacgaatttcataaacaaggttcagctttctactttggcttattcgacccggacgaaaaagagattattggcgttgccaatttttccaatgttgttcgtggctcttttcatgcctgctatctcggttattcgattgggcaaaaatggcagggcaaaggactcatgtttgaagccctgaccgcagccattcgttatatgcagcgcacccaacatattcatcgcattatggctaattatatgccgcacaataaacgcagcggtgatttactggcgcgactgggttttgaaaaagaaggctatgcgaaagactatctgttgattgatggacaatggcgcgatcacgtactgacggcattaactaccccagactggacgcccggccgctaaggagaatctcatgaaatatcaacttactgcccttgaagctcgcgtgattggttgcttgctggaaaagcaggtgaccacgccggagcaatacccgctctcagtcaatggtgtagtcacggcctgtaatcagaaaacgaaccgtgaaccggtcatgaatctgagtgaatccgaagtgcaggaacagctggataatctggtcaaacgtcattatctacgcacagtgagcggttttggtaatcgggtcaccaaatatgagcaacgtttttgtaattcagaatttggcgatctgaaactgagcgcagcggaagtggcgttaatcaccacgttgttattgcgtggtgcccagacgccaggtgaactgcgcagccgcgccgcgcgaatgtatgaattcagcgatatggcggaagtggagtcgacgctggaacaactggcaaatcgcgaagatggtccttttgtggtgcgtctggcccgcgaaccgggtaaacgcgaaaaccgctacatgcatcttttcagtggtgaggttgaagatcagccggcggtgacggatatgtcgaacgcggttgacggtgatttacaggcccgcgtcgaagccctggaaatcgaagtggcagaactgaaacagcgtcttgattcgttgctggcccatctgggagattaaagtgaaaaaattacgtatcggcgtagtgggattaggtggcattgcgcaaaaagcgtggttaccggtgctggcggcagcgtctgactggacgttacaaggagcctggtcgcctacgcgcgcgaaagccctgccaatttgtgaaagctggcgcattccttatgccgattcgttatccagccttgccgccagttgcgatgcggtttttgtgcattccagcaccgccagccactttgacgtggtcagtacgttactcaatgcgggggtacatgtctgtgtcgataaaccgctggcagaaaatctgcgcgatgctgaacggctggtggaactggcggcgcggaaaaaactgacgttgatggtcggttttaaccgtcgtttcgcaccactctacggtgagttaaaaacgcaactcgccaccgcagcctcgctaagaatggataaacatcgtagcaatagcgtcgggccacacgatctttatttcacgttgctggatgattatctgcatgtggtggataccgcgctgtggttgtcgggcggcaaagcctctctggatggcggtacgctactgactaacgacgctggcgaaatgctgtttgccgagcaccatttttcggctggtcctttgcagatcaccacctgtatgcatcgccgtgccggaagtcagcgtgaaaccgtgcaggccgtgactgacggtgcgctcatcgacattacggatatgcgcgaatggcgtgaggagcgcgggcagggcgtagtgcataaaccgattcctggttggcagagtacgcttgagcaacgtgggtttgtcggctgtgcgcggcacttcattgaatgtgtgcaaaaccagacagttccgcaaaccgccggcgaacaggccgtgctggcgcaacgtatcgttgacaagatctggcgcgatgcgatgagtgaataaaccctgtaacatctggcggtagcaattcaccataatccaggtagactattcgcctctttcagcgcctgccttgcaggcgttttgcccgtgggtctggattagaacaccgatgaatttattaaaatcgctggccgccgtcagctcgatgaccatgttttcgcgtgtgcttggcttcgcacgagacgcaattgtcgccagaatctttggcgcagggatggcaaccgacgcctttttcgtcgcttttaaacttcctaacttgttacgccgtatctttgccgaaggggcattttcccaggcatttgtaccgattctggcggaatataaaagtaagcagggtgaagacgccacgcgggtctttgtctcttatgtttctggcctgctgacacttgcgctggcggttgtgacggtcgctggcatgctcgccgcaccgtgggtgatcatggtgaccgcgccaggcttcgctgacacagctgacaaatttgccctgaccagccagctactaaagattacctttccctatatcttgctgatctccctggcgtcgctggtgggagcgattctgaatacgtggaaccgcttctcgattccggcgtttgctccaacactgcttaacatcagcatgattggtttcgcgctgtttgccgcaccgtactttaacccaccggtgctggcgctggcgtgggctgttacggtcggcggcgtcctgcagctggtgtatcagctaccgcacctgaagaagatcggcatgctggtcctgccgcgcattaacttccacgatgccggagcaatgcgcgtggtgaaacagatgggaccggcgatccttggcgtctctgtgagccagatctccttaatcatcaacaccatttttgcctcgtttcttgcttccggttcggtgtcttggatgtattacgccgaccgcttaatggagtttccgtccggtgtgctgggcgtggcgcttggcaccattttgctgccgtcgctgtcgaaaagttttgccagtggcaatcatgatgaatacaaccgtttgatggactgggggttgcgtctttgtttcctgttggcgctgccgagtgcggttgcgttgggcattctttccggtccgttgaccgtttcgctgttccagtacggtaaatttaccgcgtttgatgcgctgatgacccagcgggcgttaattgcctactcggtgggtttgattggcctgattgtagtgaaagtgttggctcctggcttttattcccgccaggacattaaaacgccagtgaaaattgccatcgttacgctgattttaacgcaattgatgaacctggcgtttattggtccgttgaaacatgccgggctgtcactttctattggtctggcggcgtgtctgaatgcttcgctgctttactggcagttgcgtaagcagaaaatctttaccccgcaacccggctggatggcgtttctgttgcgtctggtggtggcggtactggtgatgtctggcgtgcttttaggtatgttacatatcatgccggagtggtcattgggtaccatgccctggcgtttactgcgtttaatggcggtcgtgctggcggggattgccgcgtacttcgctgcactggcggtactgggcttcaaagttaaagaatttgcccgccggacggtgtaacaatgcattccggcctgcagtgcaggccggagataatcttcagatcgaaatctttttaccgccgcgatgggttgttgaggtctgaccgttcgccccatatagcgtcggttcctgatgcggtttcaacatttccagcgcctgttgattgcgctcaatctgtccttccagtaaccagccgttatgttgattcatttggcgtagttgctgcgttttcacagtaatttcctgccagcgttgactaatatcaacgctatttgctgtattgggttctttcctgcgtaactgttcgaggtaatccagcgtcgccagcagtgagcttttttgttctgtaatccattgcaactggctgccgttgatctgccccatagagagatgttgctgctcttgatccattaccgttttgagatcgttaagcacagcggacatctggtcgaggatctctgcaagacgtgtcatacgatcagttactctgcaagtcttgctgcgcttcgttgatcagcgcatcggcaattttgccggtgtccatttttagttcaccgttacgaatcgccagttttaacgcttcgacacgttcaagattgatatcactgctgccgggttgcatcagttttgcttgcgcgtcgcttaacgtcacactggtgctggtggaggcggttgtttttgccgcccggctgttcgttaccggcgcgtcagtggtttcgcgcggttgaacggtgcttacaggcttcagaggcgaagtgcgatcaatactcatggtttattcctcattgagggcgcttttatcatgtgttgcttatttatcggcaagggacgggtaatctttaacagcttacaggtttataagaatattcccatctgcatcaacaacgccgctgactacctgtcccgataccatgcgcacccgcgcattctgtgcgacggctgcattgttcagcgcctgaccttctgcgttggcgctaaacccatcaccgctggcgatcacattgacgcgttgtcccgcttttacccgccatgcctggcgaaactgggttaactggataggttgatcgggtgatagatcgcgcaggctaatggcatcaacaagttgattgatatccagcaccgtacgcggtggcagggtatccagccgtccgcgtttcagtttgacattgccagcttccagctttcctccccgcgcaatgggcatcgcggcaaccacataatttcctgtggcctgtacattaacctgtaaatatcgtttgtcgttaccgcagcgtgccaacacattcacattgccccacaggcgggaattattgctcatcgaaagcaatggctgctcgcatggcggtagtagattgggcgctgtacgaatagaaacacgaacctcatcacttacccccgcgagttgggcgctaaaaaagttgtgcaattgcgatgtgagattgctcgccgtacttaacggactgaacagtatcgcgatgatcgccacgctacgttttattatcagcattttcgcccccagccatttctacaacgtgaattgtacctgtccgcaatgaccatcaacggcataaatagcgacccattttgcgtttattccgccgataacgcgcgcgtaaaggcatttaagctgatggcagaattttgatacctgcggaggagatatgctcgataagctcgacgccgccttacgttttcaacaagaggcgctcaatctgcgcgcccagcgtcaggaagtgctggcagcaaacatcgccaatgccgatacccctggttatcaggcgcgcgatatcgattttgccagtgaacttaaaaaagtcatgcaacgtggacgggatgcaaccagtgtggttgcactgacgatgacctcaacgcaacacattccggcgcaggcgctgacgcctcctaccgcagaactgcaataccgtattccggaccagccttcgcttgacggtaataccgtcgatatggatcgcgaacgcacccagtttgccgataacagcctgcaataccagatgagccttagcgcgttgagcgggcaaatcaaaggcatgatgaacgttttacagagcggaaattaacggatggcactgctgaatatttttgatatcgccgggtcggcgttaactgcccagtcccagcgcctgaacgtggcggccagtaatctggcgaatgctgatagcgtgaccggtcccgatggacagccatatcgggcaaaacaggtggtattccaggttaacgctgcaccaggtgctgcgacaggcggcgtaaaggttgccgatgttatagaaagtcaggccccggacaaactggtttatgaaccgggtaatccgctggcagatgcaaagggctacgtaaaaatgccgaacgttgatgttgtcggagagatggttaacaccatgtcggcgtcacgcagctatcaggccaatgttgaagtgctcaacacggtgaaaagcatgatgctgaaaacccttacgctcggtcaataaaggagaaagctatgtccattgcggtaaccaccaccgatccgacaaataccggcgtcagtaccaccagcagtagttcgctcacgggcagcaacgccgcagatttacaaagcagttttctgactttgctggtggcgcagctgaaaaaccaggacccgaccaatccaatggaaaacaacgagctgacgtcgcaattggcacaaatcagcacggtcagcgggattgaaaaactcaataccacgctcggatctatttccggacagattgataacagccagtcgttacaggccagtaacctgatcggtcacggcgtgatgatccccggcaccactgttcttgcgggaaccggcagtgaagaaggggctgtgaccacgaccacgccgtttggtgttgagctgcaacaggcggcagacaaagttacggccaccatcaccgataaaaatggcgcggttgtgcgcaccattgatattggtgaactgaccgccggagttcacagtttcacctgggacggtacgttgactgatggcagcactgcgccgaacggttcttacaatgtagcgattagcgccagtaacggtggtacacaactggttgcccagccgctgcagtttgctctggtgcagggtgtgatccgcggcaacagcggtaatacgctggatctcggcacttacggcaccaccaccctcgacgaagtacggcagataatttaagccttcacatttcaggagtcagtcatggccttttctcaagcggttagcggattaaacgctgccgccaccaacctcgatgttattggcaacaatatcgccaactccgccacctacggctttaaatcaggcacggcctcttttgccgatatgtttgccggttcgaaagtgggactgggggtaaaagttgccggtatcactcaggactttaccgatggcacgaccaccaacaccgggcgaggtctggacgttgctatcagccagaacggttttttccgtctggtagacagcaacggttcggtgttctacagccgtaacggacaatttaagctggatgaaaaccgtaacctggtgaatatgcaaggtttacagctgacgggttacccggcaaccggtacgccgccgactattcagcaaggggcgaatccgaccaatatttcgatcccgaataccctgatggcagcgaaaactaccaccacggcatcgatgcagatcaacctgaattccagtgatccgcttcctactgttacgccattcagcgccagcaatgcggatagctataacaaaaaaggttcggtgactgttttcgacagtcagggtaatgctcatgacatgagcgtctactttgtgaagaccggggataataactggcaggtctacacccaggatagcagtgatccaaacagcattgcgaagacagcgacaacactggaatttaatgctaatggcacattagtggatggtgcgatggcgaataatatcgcaaccggcgcaattaacggtgcagaacccgccacgtttagtctgagcttcctcaactccatgcagcaaaataccggcgctaacaatattgtggcaaccacccagaacggctacaaaccgggcgatctggtgagttatcaaatcaatgatgacggtacggttgtcggcaactattccaacgaacaaacccaactgctggggcagattgtactggcgaactttgccaacaacgaaggtctggcatccgaaggcgacaacgtctggtctgcgacgcaatcttctggcgtggcgctgttggggacagccgggacgggaaactttggcaccctgaccaacggtgcgctggaagcgtccaacgtcgatctcagtaaagaactggtcaatatgatcgttgcccagcgtaactatcagtctaacgcccagaccatcaaaacccaggaccagatcctcaacacgctggttaacttacgctaatcgctgacgggatagctcaatggatcacgcaatttataccgcgatgggagcagccagccagacactgaatcaacaggcggtaaccgccagtaatctggccaatgcctcaacgcccggttttcgcgcgcagttgaatgctttacgcgcggtgccagtggaagggctttctctgcccacgcgcacgttggtcacggcgtcaacgccgggcgcagatatgacgcccggcaaaatggattacacctcgcgcccgctggacgtcgcgttgcagcaggatggctggctggccgtgcagaccgctgacggcagcgaagggtatacgcgtaatggcagcattcaggttgatcccaccgggcaactgacaattcaggggcatccggtgataggcgaggctgggccaattgctgtgccggaaggggcggaaatcactattgctgccgatggcacaatctcggcgctcaatccgggcgatccggcaaatacggttgcgccagtagggcgtcttaaactggtgaaagccacgggcagcgaagtgcagcgcggtgacgacggcatttttcgtttaagcgcagaaacccaggccacgcgtgggccggtactgcaggcagatccaaccttgcgtgtgatgtcgggggttctggaaggcagtaacgtcaatgccgttgcggcaatgagcgacatgattgccagcgcgcggcgttttgaaatgcagatgaaggtgatcagcagcgtcgatgataacgcaggccgtgccaaccaactgctgtcgatgagttaattgaaaggatacatgacaagtataagttgcccgatgcgcaagtttatcgggtctatgggggcaatcgcaatttatcgattttgcgagcacttgtaggccggataaggcgtttacgccgcatccggcaagaagacatatgcactttgtcactaatccactacaggacattttatgatcagttcattatggatcgccaaaacgggccttgacgcccagcaaaccaatatggacgtcattgccaacaacctggcaaacgtcagtactaacggttttaagcgtcagcgcgcggtgtttgaagatctgctttatcaaaccattcgccagccgggggcacagtcttccgaacaaaccaccttaccctccggattacaaatcggcacgggggtacgcccggtcgccactgaacgcttacacagccagggaaacctgtcgcagaccaacaacagcaaagatgtcgcgattaaagggcagggctttttccaggtgatgttgccagatggttcatcagcctatacccgtgacggctctttccaggtggatcagaacgggcagctggtgacggctggtggttttcaggtgcagccagcgatcaccattccggcgaatgcgttaagtatcaccatcggtcgtgatggcgtggtcagcgtaacccaacaaggccaggcagctccggttcaggttgggcagctcaatctcaccacctttatgaatgacaccgggctggagagcattggcgaaaacctctacaccgaaacgcaatcctctggtgcaccgaacgaaagcacgccgggcctgaacggcgcgggactgctgtatcaagggtatgttgaaacgtctaacgtcaacgtggcggaagaactggtcaatatgattcaggtgcaacgcgcttacgaaatcaacagtaaagcggtgtccaccaccgatcagatgctgcaaaaactgacgcaactctaaggcttaaccggtggcaggttcaccggtttactgatttttgaagatgatagccatgcaaaaaaacgctgcgcatacttatgccatttccagcttgttggtgctttcactaaccggctgcgcctggataccctccacgccgctggtgcagggggcgaccagtgcacaaccggttcccggtccgacgcccgtcgccaacggttctattttccagtctgctcagccgattaactatggctatcaaccgctgtttgaagatcgtcgaccacgcaatattggcgatacgctgaccatcgtgttgcaggagaacgtcagcgccagcaaaagctcctctgcgaatgccagccgtgacggtaaaactaattttggctttgatactgtgccgcgctatttgcaggggctgtttggtaacgctcgtgccgatgtcgaagcctccggtggtaacacgttcaacggaaagggcggggccaatgccagcaatacctttagcggcacgttgacggtgacggttgaccaggtactggtcaacggcaacctgcatgtggtgggtgaaaaacagattgccattaatcagggtaccgaatttattcgcttctctggcgtggttaatccacgcactatcagcggcagcaataccgtaccgtctactcaggtggcggatgcgcgcattgaatacgtaggcaatggctacattaacgaagcgcaaaatatgggctggttgcagcgtttcttccttaacctgtcgccaatgtaagtgaggctgtggtgattaaatttctctctgcattaattcttctactggtcacgacggcggctcaggctgagcgtattcgcgatctcaccagtgttcagggggtaaggcaaaactcactgattggctatggtctggtggtggggctggatggcaccggtgaccagacaacccagacgccgtttaccacacaaacgcttaataacatgctctcacagctgggaattaccgttccgacgggcaccaatatgcagctaaaaaacgtcgctgcggtaatggtgacagcgtcacttcctccgtttggacgtcaggggcaaaccatcgatgtggtggtttcttccatgggaaatgccaaaagcttgcgtggaggtacgttgttgatgacaccgcttaagggcgttgacagtcaggtgtatgcgctggcgcagggcaatattctggttggcggcgcaggagcctccgctggcggtagcagtgttcaggttaaccaactgaacggtggacggatcaccaatggtgcggttattgaacgtgaattgcccagccagtttggcgtcgggaatacccttaatttgcaacttaacgacgaagatttcagcatggcgcagcaaatcgctgacaccatcaaccgcgtgcgtggatatggcagcgccaccgcgttagatgcgcggactattcaggtgcgcgtaccgagtggcaacagttcccaggtccgcttccttgccgatattcagaatatgcaggttaatgtcaccccgcaggacgctaaagtagtgattaactcgcgcaccggttcggtggtgatgaatcgcgaagtgaccctcgacagctgcgcggtagcgcaggggaatctctcagtaacagttaatcgtcaggccaatgtcagccagccagatacaccgtttggtggtggacagactgtggttactccacaaacgcagatcgatttacgccagagcggcggttcgctgcaaagcgtacgttccagcgccagcctcaataacgtggtgcgcgcgctcaatgcgctgggcgctacgccgatggatctgatgtccatactgcaatcaatgcaaagtgcgggatgtctgcgggcaaaactggaaatcatctgatgatcagcgacagcaaactactggcaagtgcggcctgggatgcgcaatcactcaacgaactaaaggcgaaagcgggcgaagatccggcggcaaatatccgtccggtggcccgtcaggtggaagggatgttcgtgcagatgatgttgaaaagcatgcgcgacgctttaccaaaagatggcctgttcagcagcgagcacactcgcctgtataccagtatgtatgaccagcagattgcccaacagatgacggcgggcaaaggtctggggcttgcagagatgatggttaaacagatgacgccagaacaaccattgccagaggagtccacgccagcagcaccgatgaaattcccgctcgaaactgtggtgcgttatcaaaatcaggcgctttcgcagctggtgcaaaaggccgtgccacgtaactacgatgattcgctgccgggtgacagtaaagcattcctcgcgcaactctcgctgcccgcccaactggcaagccagcaaagcggtgtgccacatcatttgatcctcgctcaggcggcactggaatctggttgggggcaacggcaaatccgccgcgaaaacggcgagccgagctataacctgtttggtgtcaaagcctctggcaactggaaagggccagttactgaaatcaccacgactgaatatgaaaacggcgaagcgaagaaagtaaaagcgaagtttcgcgtctacagctcgtatctggaagccttgtcggattacgttgggctgttaacgcgtaacccgcgctacgccgccgtgacgaccgccgcgagtgcggaacagggggcgcaggccctacaggacgcgggctatgccaccgatcctcactatgcccgcaaactcaccaacatgattcagcagatgaaatcgataagcgacaaggtgagcaaaacctacagtatgaacattgataatctgttctgaataactcaagtccggcgggtcgctgccgataatactctgtaattgaaggcttataaggaacctccatgtccagcttgattaataacgccatgagcggactgaacgcggcccaggcggcgttaaatacggcaagtaataatatctccagctataacgttgccggatatacccgccaaaccactattatggcgcaggccaatagcacgttgggcgctggcggctgggttggcaatggtgtctacgtttctggtgtgcagcgtgagtatgatgcgtttattaccaaccagttacgtgcggcgcagacgcaaagtagcggtctgactgcccgctatgagcagatgtcgaaaatcgacaatatgctctccaccagtacctcttcgctggcaacacagatgcaggatttcttcaccagcctgcaaacgctggtgagtaacgcggaagacccggcagcgcgccaggcgctgattgggaaatcagaaggattggtgaatcagtttaaaaccaccgatcaatatctgcgcgaccaggacaaacaggtcaatatcgcgataggtgccagcgttgatcagatcaacaactacgctaaacaaattgccagcctgaacgatcaaatctcgcgcctgacaggcgtgggggcaggggcgtcacctaacaatctgctggatcaacgcgatcaactggtgagcgaattaaaccagattgttggtgtagaagtcagcgttcaggatggcggcacttataacatcacgatggccaatggttactcactggttcagggaagtacggcgcggcaactggcggcagttccttccagcgctgacccttctcgtacgactgtcgcttatgttgatgggacggcaggcaatattgagatcccggagaaattactgaataccgggtcgctgggcggcattctgacattccgttctcaggatctggaccagacgcgtaatacgcttggacaactggcgctggcatttgccgaggctttcaacacccaacacaaagccggatttgatgctaacggcgatgccggtgaagatttctttgctatcggtaagcccgcggttctgcaaaacacgaaaaacaaaggtgacgttgcgatcggtgccacggtaactgatgcctccgcggtactggcgacagattacaaaatctcgttcgataataatcagtggcaggtcacccgccttgccagcaataccacttttacggtgacgccggatgccaacggtaaagtggcatttgatggtctggagttgacgtttacaggaacgcctgccgttaacgacagcttcacgctgaaaccagtaagtgacgccatcgtcaacatggatgtattaatcaccgacgaagcgaaaatagcgatggcgagcgaagaagatgcgggtgatagcgataaccgcaacggtcaggccctgctggatctgcaaagcaacagtaaaacggtgggcggtgcgaaatcctttaacgacgcttatgcctcgttagtgagtgatatcggtaataaaaccgcgacgttgaaaaccagtagcgccacgcaaggtaatgtggtgacgcagctttccaatcagcagcagtcgatttccggtgtcaatctcgatgaggagtacggaaatctgcaacgttttcagcagtattacctggcgaatgcgcaggttctgcagacggcaaacgcgatttttgatgcgctgattaacattcgctaaggggagataagatgcgtttcagtacacagatgatgtaccagcaaaacatgcgtggtatcaccaattctcaggcagaatggatgaagtacggcgaacagatgtcgacgggtaagcgagtcgttaacccttctgacgatcccattgctgcatcacaagccgtagttctctcccaggcacaggcgcaaaacagccagtacacgctggcgcgtactttcgccactcaaaaagtgtcactggaagagagtgtacttagccaggtcaccactgctatccagaatgctcaggaaaaaattgtctacgccagcaatggcaccttgagtgacgatgaccgggcctcgctggctacggatattcaggggcttcgtgaccagttgctgaatctggcaaacaccactgacggtaacgggcgctacatttttgccggttataaaacagagactgcgccgtttagcgaagagaaagggaaatacgtcggtggagcagaaagtattaaacaacaggtcgatgcttcgcgttcgatggtgatagggcacacgggtgacaaaattttcgacagtattaccagcaacgcggtagcggaaccagacggtagcgcttctgaaaccaatctttttgccatgctggatagtgccatcgcagccctgaaaacgccggtcgcggatagcgaagcggataaagaaaccgccgctgcggcgttagataaaaccaaccgcggactgaaaaactcgctgaacaatgtgctgactgttcgcgcggaattaggcacgcagctgaacgaactggagtcgctggattcattaggtagcgatcgcgctttagggcaaacgcagcagatgagcgatctggttgatgtggactggaatgcaactatttcatcttacatcatgcagcaaacggcattgcaggcatcgtataaagcatttaccgatatgcagggattgtcgctcttccagctcagcaaataatttcgctttaaaacatatcatgaaactgggtatgttttgtctgcctgctctgggatcgctggggcgggcatttttttgcctattttgcattgttggttagcaaggatgccattcgatgaattttaatatgttgattcaaagatgaaataaaaaagccctggcagttaccagggcttgattactttgagctaattattactcaacaggttgcggacgcgcaggagcggcagaggcatgatgtgttgccgtatgaccacctgcggcacctttaccttcgaaggcaaaagtagggcgctgccagtcactgtgacgcggtgcctccggaacatattccggtgctggagcgcgcgtcattggcgcggtagcgtggttatgctcaacggtgacctcaggttcgaccgcagctaccgtttcaacttctgctgcgacttcagcgactactggcgcggcaggttgagcaacaacttcaggttcagcaactacaacctcagcagtttcgacaacttcttcaatatctgccgtctcttcctgcggttcaaccaccggttctgcttgttctgcaacttcctgggctacggcaacatcagactcggtaatcacctgcggctgttcagttaccgcggcagcgatcacttcaggatgcgtcgtttcaaccacttccggttgcggttcggcaacctgaacgggggcttctacgacaccggccacttcttcaacaactggcgcgctaacaaccggttcgatagcggcggcgacagggacctcagtcaccatcggctgcacatgtacttcttcctgttcgcgctgctcttcaacctgtacatcttgcggacgtacaattggatagcggatccagactttgccagaggccagttccggagacgcgcacgctacggtcaacggcattggcgactgggttggataacgctcgtcacgatagcgacgacgacgctgaccacttacgcgcaggtgacgaggcgagcggcgagaacgacgcggcatgccaccgttgtcacggttatcagcattgttctcttcttgctgttctggtgcagtttgcgctacgactggcagcgggactttcaccagttctgtgcgtggagctggcgcttcctgaacaattggttcggcagcgacagtttcttcaaccaccggtgcgactaccgcttcttcggctacgctttgctcgtaacgcactttctgattgagctgacgctgtttacgacgcggctgaaccggacgtacacgttcttcctgttcggtttcctgaacagattgctcttcaacattcagcgccttcgcttcttgttgcgcctgacgtttatcatcattacggcggcggctacgttcacgacgcggcgcttgctgctcgtcggcggtacgcgctttttccgttacctcagcctgctgacggctctcacgcgtctcggcagtctgctgctgtgcctggcgacgattacgacggttttcttcgcgattatcgctgccttcagtacgttcactacgggtgtcgcggcgctcattacggtcacggcggttgttctgacgaggcttgcgacgatcctgttgacgttccggtttcgcttctgctttcggtgctggttgctcggtcggtttggtttcttcaccaccgctgaacagcgctttcagtgcgccgaagaagcggctcaacagcccaggttgtgcaggagctgctggtgttgccggtgcagctttcggtgctggagctacaacaggcgcggcaggttcagctggcgttggcgcaggcggcacatccggcatggcaaaggttgccagcgcaggttgttccggacgcttacgttcagcgaactcttcttcagacggcagcgccatcgcttcttcatgcagcttcggcagcatgtagcttaaggttggggtttcttcccctttacgcacgcgcagcacgtggtagtgcggggtttccatctgatcgtttggcacaattacacagcgcacaccgtcctgacgagtttcaatggcatttaccgcagaacgtttttcattcagcaggtaagaagcgattggcacaggaacaatggcgtgaacttcctgggtgttctctttcagcgcttcttcttcgatcagacgcagaatagagagcgacagcgattcgttgtcacgcacggtgccagtaccagaacaacgcggacaaacgtgatgactggattcacccagtgatgggctcaggcgctgacgggacatttccagcaggccaaagcgagaaatatggctgatttgaatacgcgcacggtcctgacgcaccgcttcacgcagacggttttctaccgcacgctggtggcgtactggcgtcatgtcgatgaagtcgataacaatcaggccgccgaggtcacgcaggcgcagctgacgagcaatctcatcggcagcttcgaggttagtgttaaacgcggtttcttcgatatcgccgccgcgggtcgcgcgtgcggagttgatgtcgatggccgttaacgcttcggtgctgtcgataacaatggaaccaccagacggcagacgaacttcacgctggaaggcggactcgatctgtgactcgatctggtagtggctgaacagcgggatctcgccggtgtacagtttgattttgctgctgaaatccgggcgacctaatgcagcgatatgctgacgtgccagttcgagcactttcgggttatcgataaggatttcgccgatgtcctgacgtaagtaatcgcggaatgcgcgaacgattacgttgctctcctgatgaatcaggaacggggccgggcggctttcagcggcttttttgatggcttcccagtgtttcagacggaagcttaaatcccattgcagcgcctcagcagatttgccgacgccagcggtgcgcacgataagccccatgccttccggcagttcaaggcttgccagtgcttcttttaattcggtacggtcgtcgccttcgatacggcgagaaatgccacccgcgcgcgggttgttcggcatcagaaccagatagctacccgccagactgataaaggtggttaatgccgcgcctttgttgccgcgctcttctttatcgatctgaacaatgacttcctgaccttcacgcaacacatctttaatgttgggacgaccatgagcactgtagttagcagggaaatattcgcgggcaatttcttttagtgggaggaaaccgtgacgttcagcgccgtaatcaacaaaagcagcttccagactcggttcaatgcgggtgattttacctttgtagatgtttgcctttttctgctcgtgccctggactttcgatatccaggtcatacagacgctgcccatctacaagggcaacgcgcaactcttcctgctgagttgcgttgattaacattcttttcatcgtaacttactcattattcttacattgacgactaagctgcgggcaaagtaacgcctttccgggtgtgaaccgatggcctcgtgtctagtcgcgtcgccaacctcacggttatcgtcagctcaaagaggcgcagagtgtcggttgcccgtttttcatgcggaaaaacagcgcaattatcaaagaaacagactgggtattactctccagaaatatttccatctaccggtaaggactgcaacccgcagcccgctaactgcctgaaagatcaatacgtcttacgccattgctgcgtggatgatcggtcgggcaaaatgggttattccgtaaaatttcttgttttaacaaggatggacacggaaacggcctcattattccactgcaagccttgttatagcaagatgacttttaccatttatcacccgcttactcacagttttttcacttcttgctggtgattggtttaataaccatcaataaagtgatcacgcagtgaagtaataaggtgcaaaagtaaatataagcatagaaaaatgagtggcgcgaatcctgttggctaattagaatcgccaaccatgaaaacagagactccatccgtaaaaattgttgctatcaccgctgacgaagcggggcaacgtatcgataactttttgcgtacccaattgaaaggcgtaccaaaaagtatgatttaccgtattttgcgtaaaggcgaagtgcgggtgaacaaaaaacgtattaagcctgaatataaactcgaagcgggtgatgaggtgcgtattccaccggttcgcgttgctgagcgggaagaagaggcggtttcgccacatctgcaaaaggtggcggcgctggcggacgtcatcttatatgaagatgatcacatcctggtgctgaataaaccttccggtacggcggtacatggcggcagtggtttaagcttcggcgttattgaaggtttgcgggcgttgcgcccggaagcgcggttccttgaactggttcatcgtcttgaccgggacacctcaggtgttttgctggtagcgaaaaaacgctcggcgttgcgttctctgcatgagcaattacgtgaaaaagggatgcaaaaagattacctggcgctggtgcgcggtcagtggcagtcgcatgtgaagagcgttcaagcaccgttactgaaaaatattctgcaaagcggcgaacgtatcgtgcgtgtgagtcaggaaggcaaaccgtcggaaacacgctttaaagtggaagaacgctatgcatttgccaccctggtgcgttgtagcccggtaacagggcgtactcaccagatccgtgtgcatacacaatatgcgggtcatccgattgcctttgacgatcgctacggtgaccgtgaatttgacaggcagctcactgaagcaggcacgggattaaatcgcctgttcctgcacgctgcagcgttgaagtttactcatccggggaccggtgaggtgatgcgtatcgaagctccgatggatgaaggtttgaagcgttgtttgcaaaagctgcgtaacgcgcgctaatacaagcatataaacctgataatgggcggttggcctgataaggcgtttacgccgcatcaggccgccagcaccgattgccggatgcgacgtaaccacatccggcgcaaaaaactatcccatcagcgggtttttcccttcccgacgtaacatctgacacagcgcgattagcggtaaaccaaccagcgtgttaggatcacgcccctctaaacgctcaaacagcgtaatgccaaatccttcactcttaaagctacccgcgcagtgcaggggatgctctttacgcacgtaattatcaatctccgcctcgctcaggtgacggaaatggacgtcaaaaggctccacttctgtttgcagatgcccattcgccgaattaaacaacgccagtccagtatagaaggtgacgatattgccgctggctttgcgtaattgcagacgggcattttcttccgttaacggtttaccggtgatttcgccatcaagaacacatacctggtctgaaccaataattaaatgatccggataacgtgacgccagagattgcgctttttcttgtgccagtcgaagcaccaactgtcgcggtgattcgtcgctgcgtggggtttcgtcgacctctggtgctgcacattcaaaagagatttgcagtttttccagaagagcgcgacgccatggcgaggtggaggctaaaataagtttaggcatatttttttccatcagatatagcgtattgatgatagccattttaaactatgcgcttcgttttgcaggttgatgtttgttatcagcactgaacgaaaataaagcagtaacccgcaatgtgtgcgaattattggcaaaaggcaaccacaggctgcctttttctttgactctatgacgttacaaagttaatatgcgcgccctatgcaaaaggtaaaattacccctgactctcgatccggttcgtacggctcaaaaacgccttgattaccagggtatctatacccctgatcaggttgagcgcgtcgccgaatccgtagtcagtgtggacagtgatgtggaatgctccatgtcgttcgctatcgataaccaacgtctcgcagtgttaaacggcgatgcgaaggtgacggtaacgctcgagtgtcagcgttgcgggaagccgtttactcatcaggtctacacaacgtattgttttagtcctgtgcgttcagacgaacaggctgaagcactgccggaagcgtatgaaccgattgaggttaacgaattcggtgaaatcgatctgcttgcaatggttgaagatgaaatcatcctcgccttgccggtagttccggtgcatgattctgaacactgtgaagtgtccgaagcggacatggtctttggtgaactgcctgaagaagcgcaaaagccaaacccatttgccgtattagccagcttaaagcgtaagtaattggtgctccccgttggatcggggataaaccgtaattgaggagtaaggtccatggccgtacaacagaataaaccaacccgttccaaacgtggcatgcgtcgttcccatgacgcgctgaccgcagtcaccagcctgtctgtagacaaaacttctggtgaaaaacacctgcgtcaccacatcactgccgacggttactaccgcggccgcaaggtcatcgctaagtaatcacgcatctgcgtgatgaagcttagtgaggattttccccaggcaactggggaaagaccaaaccgggcggcgacgataccttgacacgtctaaccctggcgttagatgtcatgggaggggattttggcccttccgtgacagtgcctgcagcattgcaggcactgaattctaattcgcaactcactcttcttttagtcggcaattccgacgccatcacgccattacttgctaaagctgactttgaacaacgttcgcgtctgcagattattcctgcgcagtcagttatcgccagtgatgcccggccttcgcaagctatccgcgccagtcgtgggagttcaatgcgcgtggccctggagctggtgaaagaaggtcgagcgcaagcctgtgtcagtgccggtaataccggggcgctgatggggctggcaaaattattactcaagcccctggaggggattgagcgtccggcgctggtgacggtattaccacatcagcaaaagggcaaaacggtggtccttgacttaggggccaacgtcgattgtgacagcacaatgctggtgcaatttgccattatgggctcagttctggctgaagaggtggtggaaattcccaatcctcgcgtggcgttgctcaatattggtgaagaagaagtaaagggtctcgacagtattcgggatgcctcagcggtgcttaaaacaatcccttctatcaattatatcggctatcttgaagccaatgagttgttaactggcaagacagatgtgctggtttgtgacggctttacaggaaatgtcacattaaagacgatggaaggtgttgtcaggatgttcctttctctgctgaaatctcagggtgaagggaaaaaacggtcgtggtggctactgttattaaagcgttggctacaaaagagcctgacgaggcgattcagtcacctcaaccccgaccagtataacggcgcctgtctgttaggattgcgcggcacggtgataaaaagtcatggtgcagccaatcagcgagcttttgcggtcgcgattgaacaggcagtgcaggcggtgcagcgacaagttcctcagcgaattgccgctcgcctggaatctgtatacccagctggttttgagctgctggacggtggcaaaagcggaactctgcggtagcaggacgctgccagcgaactcgcagtttgcaagtgacggtatataaccgaaaagtgactgagcgtacatgtatacgaagattattggtactggcagctatctgcccgaacaagtgcggacaaacgccgatttggaaaaaatggtggacacctctgacgagtggattgtcactcgtaccggtatccgcgaacgccacattgccgcgccaaacgaaaccgtttcaaccatgggctttgaagcggcgacacgcgcaattgagatggcgggcattgagaaagaccagattggcctgatcgttgtggcaacgacttctgctacgcacgctttcccgagcgcagcttgtcagattcaaagcatgttgggcattaaaggttgcccggcatttgacgttgcagcagcctgcgcaggtttcacctatgcattaagcgtagccgatcaatacgtgaaatctggggcggtgaagtatgctctggtcgtcggttccgatgtactggcgcgcacctgcgatccaaccgatcgtgggactattattatttttggcgatggcgcgggcgctgcggtgctggctgcctctgaagagccgggaatcatttccacccatctgcatgccgacggtagttatggtgaattgctgacgctgccaaacgccgaccgcgtgaatccagagaattcaattcatctgacgatggcgggcaacgaagtcttcaaggttgcggtaacggaactggcgcacatcgttgatgagacgctggcggcgaataatcttgaccgttctcaactggactggctggttccgcatcaggctaacctgcgtattatcagtgcaacggcgaaaaaactcggtatgtctatggataatgtcgtggtgacgctggatcgccacggtaatacctctgcggcctctgtcccgtgcgcgctggatgaagctgtacgcgacgggcgcattaagccggggcagttggttctgcttgaagcctttggcggtggattcacctggggctccgcgctggttcgtttctaggataaggattaaaacatgacgcaatttgcatttgtgttccctggacagggttctcaaaccgttggaatgctggctgatatggcggcgagctatccaattgtcgaagaaacgtttgctgaagcttctgcggcgctgggctacgacctgtgggcgctgacccagcaggggccagctgaagaactgaataaaacctggcaaactcagcctgcgctgttgactgcatctgttgcgctgtatcgcgtatggcagcagcagggcggtaaagcaccggcaatgatggccggtcacagcctgggggaatactccgcgctggtttgcgctggtgtgattgatttcgctgatgcggtgcgtctggttgagatgcgcggcaagttcatgcaagaagccgtaccggaaggcacgggcgctatggcggcaatcatcggtctggatgatgcgtctattgcgaaagcgtgtgaagaagctgcagaaggtcaggtcgtttctccggtaaactttaactctccgggacaggtggttattgccggtcataaagaagcggttgagcgtgctggcgctgcctgtaaagcggcgggcgcaaaacgcgcgctgccgttaccagtgagcgtaccgtctcactgtgcgctgatgaaaccagcagccgacaaactggcagtagaattagcgaaaatcacctttaacgcaccaacagttcctgttgtgaataacgttgatgtgaaatgcgaaaccaatggtgatgccatccgtgacgcactggtacgtcagttgtataacccggttcagtggacgaagtctgttgagtacatggcagcgcaaggcgtagaacatctctatgaagtcggcccgggcaaagtgcttactggcctgacgaaacgcattgtcgacaccctgaccgcctcggcgctgaacgaaccttcagcgatggcagcggcgctcgagctttaaaagaggaaaatcatgaattttgaaggaaaaatcgcactggtaaccggtgcaagccgcggaattggccgcgcaattgctgaaacgctcgcagcccgtggcgcgaaagttattggcactgcgaccagtgaaaatggcgctcaggcgatcagtgattatttaggtgccaacggcaaaggtctgatgttgaatgtgaccgacccggcatctatcgaatctgttctggaaaaaattcgcgcagaatttggtgaagtggatatcctggtcaataatgccggtatcactcgtgataacctgttaatgcgaatgaaagatgaagagtggaacgatattatcgaaaccaacctttcatctgttttccgtctgtcaaaagcggtaatgcgcgctatgatgaaaaagcgtcatggtcgtattatcactatcggttctgtggttggtaccatgggaaatggcggtcaggccaactacgctgcggcgaaagcgggcttgatcggcttcagtaaatcactggcgcgcgaagttgcgtcacgcggtattactgtaaacgttgttgctccgggctttattgaaacggacatgacacgtgcgctgagcgatgaccagcgtgcgggtatcctggcgcaggttcctgcgggtcgcctcggcggcgcacaggaaatcgccaacgcggttgcattcctggcatccgacgaagcagcttacatcacgggtgaaactttgcatgtgaacggcgggatgtacatggtctgaccgcgatttgcacaaaatgctcatgttgcgcgcagtctgcgtggttatgagtaataattagtgcaaaatgatttgcgttattggggggtaaggcctcaaaataacgtaaaatcgtggtaagacctgccgggatttagttgcaaatttttcaacattttatacactacgaaaaccatcgcgaaagcgagttttgataggaaatttaagagtatgagcactatcgaagaacgcgttaagaaaattatcggcgaacagctgggcgttaagcaggaagaagttaccaacaatgcttctttcgttgaagacctgggcgcggattctcttgacaccgttgagctggtaatggctctggaagaagagtttgatactgagattccggacgaagaagctgagaaaatcaccaccgttcaggctgccattgattacatcaacggccaccaggcgtaagtgaacatctccaggcggtcgttcgaccgcctgagttttatctttttgtcccactagaatcattttttccctccctggaggacaaacgtgtctaagcgtcgtgtagttgtgaccggactgggcatgttgtctcctgtcggcaataccgtagagtctacctggaaagctctgcttgccggtcagagtggcatcagcctaatcgaccatttcgatactagcgcctatgcaacgaaatttgctggcttagtaaaggattttaactgtgaggacattatctcgcgcaaagaacagcgcaagatggatgccttcattcaatatggaattgtcgctggcgttcaggccatgcaggattctggccttgaaataacggaagagaacgcaacccgcattggtgccgcaattggctccgggattggcggcctcggactgatcgaagaaaaccacacatctctgatgaacggtggtccacgtaagatcagcccattcttcgttccgtcaacgattgtgaacatggtggcaggtcatctgactatcatgtatggcctgcgtggcccgagcatctctatcgcgactgcctgtacttccggcgtgcacaacattggccatgctgcgcgtattatcgcgtatggcgatgctgacgtgatggttgcaggtggcgcagagaaagccagtacgccgctgggcgttggtggttttggcgcggcacgtgcattatctacccgcaatgataacccgcaagcggcgagccgcccgtgggataaagagcgtgatggtttcgtactgggcgatggtgccggtatgctggtacttgaagagtacgaacacgcgaaaaaacgcggtgcgaaaatttacgctgaactcgtcggctttggtatgagcagcgatgcttatcatatgacgtcaccgccagaaaatggcgcaggcgcagctctggcgatggcaaatgctctgcgtgatgcaggcattgaagcgagtcagattggctacgttaacgcgcacggtacttctacgccggctggcgataaagctgaagcgcaggcggtgaaaaccatcttcggtgaagctgcaagccgtgtgttggtaagctccacgaaatctatgaccggtcacctgttaggtgcggcgggtgcagtagaatctatctactccatcctggcgctgcgcgatcaggctgttccgccaaccatcaacctggataacccggatgaaggttgcgatctggatttcgtaccgcacgaagcgcgtcaggttagcggaatggaatacactctgtgtaactccttcggcttcggtggcactaatggttctttgatctttaaaaagatctaagttgtcattttccacccttataaaaggtccgcttgcgggccttttttcttagcttttattccgacttgttccgtagtgaacatgctgccacactaacaattctctgataaggagccggtatgttcttaattaacggtcataagcaggaatcgctggcagtaagcgatcgggcaacgcagtttggtgatggttgttttaccaccgccagagttatcgacggtaaagtcagtttgttatcggcgcatatccagcgactacaggatgcttgtcagcggttgatgatttcctgtgacttctggcctcagcttgaacaagagatgaaaacgctggcagcagaacagcaaaatggtgtgctgaaagtcgtgatcagtcgcggtagtggcgggcgagggtacagcacattgaacagcggaccggcaacgcggattctctccgttacggcttatcctgcacattacgaccgtttgcgtaacgaggggattacgttggcgctaagcccggtgcggctggggcgcaatcctcatcttgcaggtattaaacatctcaatcgtcttgagcaagtattgattcgctctcatcttgagcagacaaacgctgatgaggcgctggtccttgacagcgaagggtgggttacggaatgctgtgcggctaatttgttctggcggaagggcaacgtagtttatacgccgcgactggatcaggcaggtgttaacggcattatgcgacaattctgtatccgtttgctggcacaatcctcttatcagcttgtcgaagtgcaagcctctctggaagagtcgttgcaggcagatgagatggttatttgtaatgcgttaatgccagtgatgcccgtatgtgcctgtggcgatgtctccttttcgtcagcaacgttatatgaatatttagccccactttgtgagcgcccgaattagtcatgaaaaaagtgttattgataatcttgttattgctggtggtactgggtatcgccgctggtgtgggcgtctggaaggttcgccatcttgccgacagcaaattgcttatcaaagaagagacgatatttaccctgaagccagggaccggacgtctggcgctcggtgaacagctttatgccgataagatcatcaatcgtccacgggtttttcaatggctgctgcgtatcgaaccggatctttctcactttaaagccgggacttaccgctttacaccgcagatgaccgtgcgcgagatgctgaaattgctggaaagcggtaaagaagcacagttccctctgcgactggtagaagggatgcgtctgagcgattacctcaagcaattgcgtgaggccccgtatatcaagcatacgctgagcgatgataagtacgccaccgtagcgcaggcacttgaactggaaaacccggagtggattgaaggttggttctggccagacacctggatgtataccgccaataccaccgatgtcgcgttactcaagcgagcgcacaagaaaatggtgaaagcggtcgatagcgcctgggaagggcgtgcggacggtctgccttataaagataaaaaccagttggtgacgatggcatcaattatcgaaaaagaaaccgccgttgccagtgaacgcgataaggttgcctcagtatttatcaaccgtttacgcattggtatgcgcctgcagaccgacccgaccgtgatttacgggatgggagagcgttataatggcaaactttctcgtgcagacctggaaacgccgacagcgtataacacctataccattaccggtctgccgccaggtgcgatagcgacgccgggggcggattcgctgaaggctgctgcgcatccggcaaaaacgccgtatctctattttgtggccgatggtaaaggtggtcacacgtttaataccaatcttgccagtcataacaagtctgtgcaggattatctgaaagtgcttaaggaaaaaaatgcgcagtaagtatatcgtcattgaggggctggaaggcgcaggcaaaactaccgcgcgtaatgtggtggttgagacgctcgagcaactgggtatccgcgacatggttttcactcgggaacctggcggtacgcaacttgccgaaaagttaagaagcctggtgctggatatcaaatcggtaggcgatgaagtcattaccgataaagccgaagttctgatgttttatgccgcgcgcgttcaactggtagaaacggtcatcaaaccagctctggctaacggcacctgggtgattggcgatcgccacgatctctccactcaggcgtatcagggcggcggacgtggtattgaccaacatatgctggcaacactgcgtgatgctgttctcggggattttcgccccgacttaacgctctatctcgatgttaccccggaagttggcttaaaacgcgcgcgtgcgcgcggcgagctggatcgtattgagcaagaatctttcgatttctttaatcgcacccgcgcccgctatctggaactggcagcacaagataaaagcattcataccattgatgccacccagccgctggaggccgtgatggatgcaatccgcactaccgtgacccactgggtgaaggagttggacgcatgagatggtatccatggttacgacctgatttcgaaaaactggtagccagctatcaggccggaagaggtcaccatgcgctactcattcaggcgttaccgggcatgggcgatgatgctttaatctacgccctgagccgttatttactctgccaacaaccgcagggccacaaaagttgcggtcactgtcgtggatgtcagttgatgcaggctggcacgcatcccgattactacaccctggctcccgaaaaaggaaaaaatacgctgggcgttgatgcggtacgtgaggtcaccgaaaagctgaatgagcacgcacgcttaggtggtgcgaaagtcgtttgggtaaccgatgctgccttactaaccgacgccgcggctaacgcattgctgaaaacgcttgaagagccaccagcagaaacttggtttttcctggctacccgcgagcctgaacgtttactggcaacattacgtagtcgttgtcggttacattaccttgcgccgccgccggaacagtacgccgtgacctggctttcacgcgaagtgacaatgtcacaggatgcattacttgccgcattgcgcttaagcgccggttcgcctggcgcggcactggcgttgtttcagggagataactggcaggctcgtgaaacattgtgtcaggcgttggcatatagcgtgccatcgggcgactggtattcgctgctagcggcccttaatcatgaacaagctccggcgcgtttacactggctggcaacgttgctgatggatgcgctaaaacgccatcatggtgctgcgcaggtgaccaatgttgatgtgccgggcctggtcgccgaactggcaaaccatctttctccctcgcgcctgcaggctatactgggggatgtttgccacattcgtgaacagttaatgtctgttacaggcatcaaccgcgagcttctcatcaccgatcttttactgcgtattgagcattacctgcaaccgggcgttgtgctaccggttcctcatctttaagagagacatcatgtttttagtcgactcacactgccatctcgatggtctggattatgaatctttgcataaggacgtggatgacgttctggcgaaagccgccgcacgcgatgtgaaattttgtctggcagtcgccacaacattaccgggttatttacatatgcgggatctggtaggcgaacgtgacaacgtcgtattttcttgtggcgtgcatccactcaaccagaatgatccctacgatgtagaagatttacgccgtctggcggcagaagagggtgttgtagcgctgggtgaaaccgggctggattattattacacgccggaaactaaagtacgtcagcaagagtccttcatccatcatatccagattggtcgtgaactgaacaagccggttatcgtccatacccgtgacgcccgtgccgatacgctggcaattctgcgcgaagaaaaagtgacggattgcggtggcgtactacactgttttacagaggacagagaaacggcgggtaaattactggatctcggattttacatctccttttccggcattgtgaccttccgtaatgcggagcaactgcgcgatgctgcgcgttatgtccccctggatcggttactggtggaaactgactcaccttaccttgcgccggtaccgcatcgaggaaaagagaatcaacctgcgatggttcgtgacgttgcagaatacatggctgtgttgaaaggtgttgccgttgaagaactggcgcaggtaaccaccgataacttcgcccgtctgtttcacatcgacgcttcccgccttcaatccatccgttgaatgagtttttttaaagctcgtaattaatggctaaaacgagtaaagttcaccgccgaaaattgggcggtgaataaccacgtttgaaatattgtgacatatgttttgtcaaaatgtgcaacttctccaatgatctgaagttgaaacgtgatagccgtcaaacaaattggcactgaattattttactctgtgtaataaataaagggcgcttagatgccctgtacacggcgaggctctccccccttgccacgcgtgagaacgtaaaaaaagcacccatactcaggagcactctcaattatgtttaagaatgcatttgctaacctgcaaaaggtcggtaaatcgctgatgctgccggtatccgtactgcctatcgcaggtattctgctgggcgtcggttccgcgaatttcagctggctgcccgccgttgtatcgcatgttatggcagaagcaggcggttccgtctttgcaaacatgccactgatttttgcgatcggtgtcgccctcggctttaccaataacgatggcgtatccgcgctggccgcagttgttgcctatggcatcatggttaaaaccatggccgtggttgcgccactggtactgcatttacctgctgaagaaatcgcctctaaacacctggcggatactggcgtactcggagggattatctccggtgcgatcgcagcgtacatgtttaaccgtttctaccgtattaagctgcctgagtatcttggcttctttgccggtaaacgctttgtgccgatcatttctggcctggctgccatctttactggcgttgtgctgtccttcatttggccgccgattggttctgcaatccagaccttctctcagtgggctgcttaccagaacccggtagttgcgtttggcatttacggtttcatcgaacgttgcctggtaccgtttggtctgcaccacatctggaacgtacctttccagatgcagattggtgaatacaccaacgcagcaggtcaggttttccacggcgacattccgcgttatatggcgggtgacccgactgcgggtaaactgtctggtggcttcctgttcaaaatgtacggtctgccagctgccgcaattgctatctggcactctgctaaaccagaaaaccgcgcgaaagtgggcggtattatgatctccgcggcgctgacctcgttcctgaccggtatcaccgagccgatcgagttctccttcatgttcgttgcgccgatcctgtacatcatccacgcgattctggcaggcctggcattcccaatctgtattcttctggggatgcgtgacggtacgtcgttctcgcacggtctgatcgacttcatcgttctgtctggtaacagcagcaaactgtggctgttcccgatcgtcggtatcggttatgcgattgtttactacaccatcttccgcgtgctgattaaagcactggatctgaaaacgccgggtcgtgaagacgcgactgaagatgcaaaagcgacaggtaccagcgaaatggcaccggctctggttgctgcatttggtggtaaagaaaacattactaacctcgacgcatgtattacccgtctgcgcgtcagcgttgctgatgtgtctaaagtggatcaggccggcctgaagaaactgggcgcagcgggcgtagtggttgctggttctggtgttcaggcgattttcggtactaaatccgataacctgaaaaccgagatggatgagtacatccgtaaccactaatccgtaagacgttggggagactaaggcagccagatggctgccttttttacaggtgttattcagaattgatacgtgccggtaatgctgaaattacgcggtgtgccgtagacgatagaaccttccacgttggtatcgtaggttttgtcgaacaggttattgacgttcccctgtaacgagaagtttttcgtcacctggtagcgggtgaagagatccaccagcgcgtagctaccttgctcggcgcggaaggtgccatacggcgtcacggtgtcggtatacacgcgattttgccagttaacaccaccgccgaccgtcaactctggcatgacaggcaaccgatagctggtgaacattttaaccgtggtgcgtggcagattaggattaacggcgtttccttcgttatcctctgcaatatagcgcgttgcgccaaatgtcagctgccagttgtcggtaattgcgccgttgagttcaaattccacccctttactgactgtcccatccaccgctttataggcggtttcgccgttgctgccggggataggtgtaccggtggactgagcgacattatcctgctcaatacggaagatggctaacgtggtggtcagacggctattcatccagtccgatttcagacccagctcgtagttgttaccggtgattggagccagatatttgcctgaactgtcacgatcattttgcggctggaaaatagaggtatagctggcgtaggtcgaccagttgtcattgatgtcaaacaccagaccagcgtaaggcgtggtgtggtttttctccatgctgtaagtcagcgtatcaacccgccagttggtataacgtgcgccgaggatcagatgcagcggatcggcaagggtgacacgagtggcagcatataacgatttcatatgtgtggtatcgtcctgcgccaggctctgtggtgaccagtcggtttgtgggaaattgccattaaagttgtagaaactgccaatttcatccgggaagatgttggcccatgaactgaagtaacgattgttttgtttgctgtaactgccaccaaacattagattgtgctgacgaccaaacaattcataactaccgtcagcgaacaaatccagcgcatcaactttacgtttgccactgttccaaccggtgccgccgacataatcaaagccaggtccataattactgtatggcccaaccagcataccatccgctttgtttacataggcatcgacatacatcattttgctgtcaaattcgacttcagagtgggtggcattcagtgtcgcttgccaggtatcagcaaactgctgcttcagggtcataaagaccttgttgatctctttatcgttgtacgcccagtcaggtgcggtactgcgtgcgcgatcgtaactgttgctgctgccatcagtattccagcgcggtaaaccgccccaggtagggctattaacatcaatgcgctgatattcgtaaccggctgaaagcgtcgtaagatcgcctaaatcagcatcgacaatgcccgagaagaaggtcttttcactgttgtagcggtccagccatgagtcgttattctggtagccgccgacaattcgcgcgcggattttaccgtcttcggtgagtgggctttgtaaatccgccacataccgttctttgttccagctaccgtattccgccgagacatcgcctttaaattcacgactggtcgcgtgttttcgaaccatattaattgccgcagatggattacccgtcccggtcatgagtcctgtcgcgccacgcactacttctacgcgttcaaagagtgccatatcagaaagtgcgtcgcccagattccagcgcgattcaaaataggtggggataccatcaaccatatagttatcgatctggaatccgcgggaataataaagagcacgatcggaatccgcctgacttttgctgatccccagcgtgttttccatcacttcgcccagcgtttgtaactgctgatcttccatccgctgctggctaacaatagtgaccgactgaggaatatcacgttgagtcatctgcattttggtacccgcagaggtagacgttacgctgtaatcattttcgccatcatctggagctgtggctgaaccctcaacaatcaccgtttcttcagtggctggtgcagcaaaagcggcagaaggtaatagtgccagtgctatgcaaccggcaagtagtgacggtttggtgatggcttgatattgattatccctgttaaattgtgttgaaagcatttgaaatctcttggtttatgttgtcgtcaggctcatgccggaggagggtgatgagcgattatatttagtgtgcgaataattttgtttgtaaatgcaaatgagaaatatacgcattcatatttgtcatgtaaaccaaacagagaatgtcttttcagcgcattcgcaggcagaaatgggaataatggcgatatatacggcagcaaaacgattttttgcttaagaaatcgtgagttaaggttgaaagagcaggtttaactcgaccatactctatactcgcagtgtggcgcggcgtagcatggcgcaacgcatggctatttgaaaaaggaaaatgtcgtggcagaagaaactatattcagcaaaattattcgtcgtgagatcccctccgatatcgtctaccaggatgatctggtaacggcgtttcgcgatatttcgccgcaagcgccaacgcatattctgatcattccgaatatcctcattccgactgtgaacgacgtctcagctgagcatgagcaggcgctgggacgcatgatcaccgtagcggcaaaaattgctgagcaagaaggtattgccgaagatggctatcgtctgatcatgaataccaaccgccatggcggacaagaggtttaccacatccatatgcacttgttgggtggccgtccgctgggaccaatgctggcgcataaaggtctgtaacgatgagaaaaggatgctttgggctggtgtctctggtgttgttactgctggtgggctgtcgttcacatccggaaattccggtgaatgatgagcaatcgctggtgatggagtcatctttattggctgcgggcatcagtgcagaaaagcccttcctttcgacgtctgatattcaaccttcagcatcctcaacgctttataacgaaaggcaagaacccgttaccgttcattatcgtttttactggtatgacgccagagggctggagatgcatcctctggaaaggccacgcagcgttaccattcccgcacattcggcggtaacgctgtacggcagcgccaattttctgggggcgcacaaagtcagactttatctatatttgtaaggggtgaatcttgatgacaaaaatgagtcgctacgccttgattaccgcgctggcgatgtttctcgccgggtgtgtggggcaacgtgaacctgcaccggtagaagaagtgaaaccagcgccggaacaaccagccgagccacaacagcctgtccccacagtgccctcggtgccgacgatcccgcagcagccaggcccaattgagcacgaagatcaaactgcaccgcctgcgccgcatattcgccattatgactggaatggcgcaatgcagccgatggtcagtaagatgcttggggctgacggggtgactgcgggtagcgtcctgctggttgatagcgttaacaaccgtactaacggttcgctgaatgccgcagaagcgaccgaaacgctgcgaaatgcgctggctaataacgggaaatttaccctggtttccgcccagcaactgtcgatggcgaagcaacagttaggtttgtcgccgcaggacagtttaggcacccgtagtaaagccataggcattgcccgcaatgtcggcgctcattacgtgctgtactccagcgcctctggcaacgttaacgctccgaccctacaaatgcagctgatgctggtgcagacgggcgaaattatctggtcaggtaaaggtgccgtttcgcagcaataatcccatcacgcgcgacgaattgctgtcgcgctttttcccgcagtatcatcccgtcacgacgtttaatagtgggcttagtggcgggagttttctcattgaacatcagggccagcgttttgttgtgcgtcagccgcacgatcctgatgcgccgcagtccgcgttcttgcgccagtatcgggctttatcacaactacccgcatgcattgcaccgaagccgcatttatatctccgtgactggatggtagtcgactatctgcccggcgcggtaaaaacgtatttgccggataccaacgaactggcaggcttgctgtattatctacatcaacaaccacgttttggctggcgaataacgctgttgccgttactggaactgtactggcagcaaagcgatccggcgcggcggacagtgggttggctgcgaatgttaaaacgtctgcgcaaagcgcgggaaccacggcctttacgcttaagtccattgcatatggatgtccacgccggaaatttagtgcatagcgcgtcagggttaaaactcatcgactgggagtatgccggagatggtgatatcgcgctggaactggcggcggtgtgggtggaaaatactgaacagcaccggcaattggtcaatgactatgccactcgcgcgaagatttatccggcgcaattatggcgtcaggtcaggcgatggtttccctggctgctgatgctcaaagcagggtggtttgagtaccgctggcgacaaaccggcgatcaacaatttatcaggctggccgatgacacctggcggcagctattaataaaacaataaggagagcagtgtgggtccagtaatgttggatgtcgaaggttacgaactggacgcggaagagcgtgaaatactggcgcatccgctggtgggagggctgattctctttacgcgtaactatcatgatcctgcccagttacgtgaactggtgcgccagatccgcgcagcttcgcgcaatcgtctggtggtggcggttgatcaggaaggtggacgcgtgcagcgttttcgtgaaggttttacccgcttgccagcggcgcaatcattcgctgcgctgtcaggaatggaagagggtggcaaactggcgcaggaggcaggttggttgatggccagcgaaatgatcgctatggatattgatatcagctttgcgcctgtgctggatgtcgggcatatcagcgcggcgattggcgagcgttcttatcatgccgatccacaaaaagccctggcaattgccagccggtttattgatggtatgcatgaagccggaatgaaaacgaccgggaaacacttcccaggacacggtgcagtaacggcagactcacacaaagaaacaccgtgcgatccacgtccacaagcggagattcgcgctaaagatatgtcggtcttcagttccttaatccgcgaaaataaactcgacgccattatgcctgcgcatgtgatctacagtgatgttgatccgcgtccggcgagcggttctccctactggctgaaaaccgttttgcgtcaggaactgggttttgacggcgtgattttctctgacgatttatcgatggaaggtgccgcgattatgggcagttatgccgaacgcgggcaggcttcactggatgcgggttgcgatatgatcctggtctgcaataatcgtaaaggggccgtcagcgtgttagataatctgtcaccgatcaaggcagaacgtgttacacgtttgtatcataaaggttcattttcgcgacaggaactgatggactcggctcgctggaaagcgatcagcacccgtctgaatcagttacatgaacgctggcaggaagagaaagcaggtcactaaccctggcttatgtgaggaagcgatgattatctatttacacggttttgactctaacagtccgggtaaccacgagaaagtcttacaattgcagtttattgacccggatgtacgcttgataagctacagtacgcggcatccgaaacatgatatgcagcatctgcttaaagaagtggacaaaatgttgcaactgaacgttgacgagcgtccgctaatttgcggcgttggcttgggcggatactgggcggaacggattggttttctttgcgacatccgccaggtgatcttcaaccctaatttgttcccttatgagaacatggaaggcaagattgatcgcccggaagagtatgccgatattgccactaagtgtgtgaccaacttccgtgagaagaatcgcgatcgttgcctggtgattttgtcgcgtaatgatgaagcgcttaacagccagcggacatctgaagagttgcatcattattacgagattgtctgggacgaagagcagacgcacaaattcaagaatatctccccgcatttacagcgcattaaagcgttcaaaaccctcgggtaaatgccctcgtcgcatcaggtaaccttgccggtacctgatgcgctccgaattctgtgggtcggataaggcgtccacgccgcatccgacagtcgagcatcaatgcctgatgcgcttcttatcaggcctaccgaacgccctgcatacacccctcactctatatcactctcacaaattcgctcaaataataaacaataaactctgttttttgatctcacccggtaaagtcgcctatcttttcagcaacaaaacttgattaacatcaattttggtatgaccaatgcaccattcatgttattctcaatagcgaagaacattttcattgctgtaacctgttgttaattaagagctatgttaataaccattaattaacaattggttaataaatttaagggggtcacgttgactacgccattgaaaaagattgtgattgtcggcggcggtgctggtgggctggaaatggcaacacagctggggcataagctgggacgcaagaaaaaagccaaaattacgctggtcgatcgtaaccacagccacctgtggaaaccgctgctgcacgaagtggcgactggctcgcttgatgaaggcgtcgatgcgttgagctatctggcccatgcgcgcaatcatggtttccagttccagctgggttccgtcattgatattgatcgtgaagcgaaaacaatcactattgcagaactgcgcgacgagaaaggtgaactgctggttccggaacgtaaaatcgcctatgacaccctggtaatggcgctgggtagcacctctaacgatttcaatacgccaggtgtcaaagagaactgcattttcctcgataacccgcaccaggcgcgtcgcttccaccaggagatgctgaatttgttcctgaaatactccgccaacctgggcgcgaatggcaaagtgaacattgcgattgtcggcggcggcgcgacgggtgtagaactctccgctgaattgcacaacgcggtcaagcaactgcacagctacggttacaaaggcctgaccaacgaagccctgaacgtaacgctggtagaagcgggagaacgtattttgcctgcgttaccgccacgtatctctgctgcggcccacaacgagctaacgaaacttggcgttcgcgtgctgacgcaaaccatggtcaccagtgctgatgaaggcggcctgcacactaaagatggcgaatatattgaggctgatctgatggtatgggcagccgggatcaaagcgccagacttcctgaaagatatcggtggtcttgaaactaaccgtatcaaccagctggtggtggaaccgacgctgcaaaccacccgcgatccagacatttacgctattggcgactgcgcgtcatgcccgcgtccggaagggggctttgttccgccgcgtgctcaggctgcacaccagatggcgacttgcgcaatgaacaacattctggcgcagatgaacggtaagccgctgaaaaattatcagtataaagatcatggttcgctggtatcgctgtcgaacttctccaccgtcggtagcctgatgggtaacctgacgcgcggctcaatgatgattgaaggacgaattgcgcgctttgtatatatctcgctataccgaatgcatcagattgcgctgcatggttactttaaaaccggattaatgatgctggtggggagtattaaccgcgttatccgtccgcgtttgaagttgcattaatcgacgtacactggcggatgtggcataaacgcctcatccgcccttgaggaacagcgcgatcggcagccgcgttgtatcaggcatcctttcagactcctccgaatccttaagtatttccagccattcccgcgcttttcatcttctgtctgatagctgcttttctccttcgcttgcatgattggcataactgcaaagaaggaggtgttcccgtgaataaatcaatgttggcgggtatcgggattggtgtcgcagctgcgctgggcgtagcggcagtggccagtctgaacgtgtttgaacggggcccgcaatacgctcaggttgtttctgcaaccccaatcaaggaaacggttaaaacaccgcgtcaggagtgtcgcaacgtcacagtgacccatcgtcgaccggtgcaggatgaaaatcgcattaccgggtcggtgctcggcgctgttgctggcggcgtgatagggcatcagtttggtggtggtcgcggtaaagatgtcgccactgttgtgggggcgctgggtggtggatatgccggtaaccagatccagggctctctccaggaaagcgatacttacacgactacgcaacagcgttgtaaaacggtgtatgacaagtcagaaaaaatgctcggttatgatgtgacctataagattggcgatcagcagggcaaaatccgcatggaccgcgatccgggtacgcagatcccgctagatagcaacgggcaactgattttgaataacaaagtataacaaggctgtactctgcaatttggcccctcattcgctcaggctgaggggctttttttgcgacttatttcaccagttcgggccataaacgcaaagtcgttccggcaatctgcatcagtttttccagcgatgcaccttcgcgtgcgctgatcgacatcccctgaataatacaattaaggaattctgccagatgtgtcacgtcacagtggggcgggatttccccgcgcgcttgtcgttgacataaaaactgctgcaaagtgcgctcttgcatcgcatggcgtgatttcaacgtattggcgatatctcctgaatctggggagagggtggtgcagttgttgatcatgaagcagcctgccggggtgtctttgctggtaaagcagttggcgatggcagcaaaatagtcagccagcgcagactccacgcttttctcttcacaaaacagctgtgcttcatgcttagcggcaaaacgatcgatatagcggtcgagaacggcacgaaataacccctctttgttggtaaattccgcgtatagcgtgggcgctttggctccggtcgcttcgacgaggtccgcaagagaagtcgcttcataaccgtgttgccagaacaatttcatggccttatcaagcgcggcatccctgtcgaacacttttgggcggccacggcttttttttacacattgtgttgagtcagttgccatgatgccgttgtacctggtgactgtgaatgaaaggttattataaaaataatcacctccgttcaccagtccagatcccataaaaataattgctttctatttaactgaaatttaaagatttttaaattaattaatgattgttataaaaaatatcttgtatgtgatccagatcacatctatcatttagttatcgatcgttaagtaattgcttgcgacgtcattcatctgcataaggccactattatgaaaaacgtaaaaaccctcatcgctgcggcgattttaagctccatgtcatttgccagctttgcggctgtcgaagttcagtcaacgccagaaggccaacaaaaagtcggtacaatcagtgctaacgcggggacaaatctgggatcgctggaagagcagctggcgcaaaaagcggatgagatgggcgcaaaatctttccgtattacttctgtaaccggtccgaataccctccatggaacagcagtaatttataaataagcattaaccctcattaatgcctgctactgctgattttttccccgcgacatgccgtgtcgcggggatttttttatccgggctttacagcgtttgtgggctcacttgatgacggcggacatccaccggcatcccggaacggacatccatcacatgttgcatcacttcagcgtcagtttgtgctgcatctttaaatgattgcattgcgctattcagcgtaattggcagcagctgcggatcgtcatcaatcttctctgacagcggctgatgtacttcaaccagacgcgcaccgtttggttcggcagagacttttatcggagtgttgatgatattcactttggtgcctggggtgacctggctaaagagtgttttgatatcgtcatcccgcagacgaatacagccagaacttacccgcatgccaatgccgaaatcggcgttcgtaccatgaagcaaataaacgccgccataggccgccagacgaatcgcatgatggcccattgggttatccagtccagccggcactaccgcaggcaactcaattccctgtgctttataacgggcgcggatgtttgccgttggcgtccaggttgggtttgcacgtttgtctgaaacggtggtcaccattgtcggtgtcagcgtgtcaccacctaactgaccaatacctattggatacacggttaccgaatttttacccggcgggtagtaatagagacgcagctccgcaatgttgatcacaatgccttcgcgcggcgcatctggaagtagggtttgcaacgggatcgttaacacgctgcccgcgcgcggtacgtaaggatcaacgccggggttagcctgtaacagagcgagaaagccgacgttgtattttttggcgatggcttccagagaaccaccgtcattttccaccacatgaaatttgttttcgccaaccagacgactgcccgctggcggcagcggccaggtgttggcttttgccggtagcgccagcgccacggcagcggcgaacgtaaaaaacgttagccagcgagaaaaacgcgttttgatcatcaccaaaaatccataataaatataaggttattgtaataaacagataagcctgaattatggatggtgacagtgtcggatagtgcagggaagtgcaaagaatttgtaaatgttgcagatgggggcgcagaaacgcccccgatttaccattaagcgatcgcgttctcttccagttcacgcataaactggcgtacccattcgatacgcgttttccgctcactcaaatcctgaataaatttcaggcgcgtcggaccatcaaggcggtaatgctgcggctgtttttgcagcaaaccaatcaaccaggccggattaacgtgattcttctcggcaaattcgatcaccccgcctttctcattaccttccagcttcctgatccccagtttctgcgcttgctggcgcagacgggcaatatccagcagggtacgcgccggatctggcagcaggccgaagcgatcgataagctcgactttgatctcttccagttcgttttccgttttggcgctggcaatacgtttgtagaacgacagacgcgtgttcacgtcagggatgaaatcatctggcaatagcgacggcatccgcagctcgacttctgtttgctggctggtgagatcttccagcgacggctcgcgtccggctttcagtgcatcgacggcgttttccagcaactccatatacagcgagaaaccgatggtttccattgagccgctttgttcttcgccaagcagttcacccgcgccgcgaatctccagatcgtgcgttgccagcgcaaaacctgccccgagatcttccagcgaggcaattgcttcaagacgtttttgtgcatcggtagtcatcgcttttggatgcggtgtcagcaaccatgcatatgcctgatgatgcgaacgtccgacgcgaccgcgtaactggtgcagctgcgccagaccgaagtgatccgcgcgttcaatgataatagtgttggctgtcgggatgtcgatcccggtttcgataatggttgtacaaaccagcacgttgaaacgttgatgatggaaatcattcatcacccgttccagttcgcgctcgcgcatctgcccgtgaccgatggcgatccgcgcttctggcaccagttctgccagccgttcggcggctttctgaatgttttccacatcattgtagagataataaacctgtcctccgcgcaaaatttcacgcaggatcgcctcccggaccaccatgctgtcatactcacggacaaaggttttaactgccagacgacgggcgggcggcgtggcgataatcgacaggtcacgcattccgctcattgccatattcagcgtacgtgggatcggcgttgcagtaagcgtcagaatatccacgttcgcgcgcatcgctttaatgcgctctttatgacgcaccccgaagcggtgttcttcatcgacaatcagcaggcctaaatctttaaacttgacgtcactttgcagcagtttgtgcgtaccgatcagaatatcgattttcccttccgccacttccgcaaggatttgcgtctgctctttggcgctgcggaaacgggagatcatttcgatacgtaccggccagttggcgaaacggtcgcggaagttgtcgtaatgctgctgcgcgagaagggtggtaggcaccagcaccgccacctgcttgtggttatctactgccaggaaagctgcgcgcatcgccacttctgttttaccaaagccaacatcgccgcacaccagacgatccattgccagcggctgacacatgtcgctaagtaccgcattaatggcctgcgcctgatccggcgtggtttcaaacgggaagctgtcgcagaacaactgatactgctcacgatcgtgtttaaacgcgaagccctctttggcggcgcgttgcgcgtagatatccagcaattccgccgccacatcacgcactttttccgccgctttctgccgcgcgcgtgaccacgcatcgccgccaagtttatgcagcggggcgttttcttccgcgccacctgcgtaacggctaatcagatgcagtgacgacaccggaacatacagtttggcgtcgttggcataggtgagcatcagatactcgccagtaatgccacccgcttccagcgtggtcattccggcataacgaccgacgccgtgctccagatggaccaccggctgaccaatatgcagttccgcaaggttacggatcagtgtatcggggttgatggtgcggcgagaatcctgacgacgacgggcaacgcgttcaccgagcagatcgctttcgcaaatcagcgccagattacgcaccgtatcgacaaaaccatgttcggcagcgccaatcatcagataacgcccacggtcgctggcttcatcaagacgcataatgcgttgcggagcaattttaattcgtgcgagcagttcacccagcgcttcacggcgaccttcactttctaccgagaacaccaccggaccgtcgaaagtctcgaggaacttacgcagcgcatccagcggcgctttttgttgtgcctgaacggccaggtctggcagtttctggaaacctaaattggcattcgcggcttttgtcggtaaatgttcagtttttagctgcacccggggccagtttttcagctctgagaagagctcgtccacccgcagccagagcgattgtggtggcaacagcgggcgcatcggatcgacgccgcgattctcaaaacgcgccagcgtgtcagcctggaaacgttcggcactggtttccagatcgccagtattcacgagcaaggtattggcagggaaataactgaacagcggcggcagtggttcgctgaagaacaatggctgccagtactcgatcccggcaggtaatgtgcctttactcacttgctggtaaatatgttctggatcgcgcttcacttcgaaggtatcgcgccactggctgcggaacagttcaattgccgctttatcggtcggaaattcgtgcgcgggcagcagattgatcgcttctacttcctccagcgtgcgctggctgtcgacgtcaaacacccgcaggctgtcgatttcatcatcaaagaaatcaagacgataaggcagctcactccccatcgggaagagatccagcaacgcgccgcgcgtggcgtattcgccgtgctccatcacctggtcaacatggcgataaccggcgctgtccagttgggttcgtaatgcatctcgtgacaggcgctgaccttttttcatcaccagcgcatgaccgtggagaaaactgtgtgggcaaacgcgctgcataagcgtattcaccggaacaatcagtacgccacgctgcatcgtcggtagctggtaaagggtggaaaggcgcgaggagataatgtcctgatgaggcgaaaaactgtcgtagggaagagtttcccagtccgccagattcatcaccatttgatcggtaaactggctgatttcatcatgcaaacgcagagcattttgcatatctggtgcaatgagtaccaccggaccggcgtgacgttcggcaatttccgctaccagcgttgcacaggctgcgccggttaactcgcccagcagacgctgctcacccgctttgacgggcagcgtataacgatattgttcaggcataacggttgtcagattctcgttaggatatgcctcaacatatgggggcatatctctgataagcaatgctgttcattatccgtaatcgacatggtttagcaaattgaatcgccccggctggggcgatggcttagcgggagtaactgacggcagcgggcagtgaaggcggggagaacaacagatcgctgaatgcacgctgtgaaagttttcttaccagcaagcccgcaacagtacagatgaacaaactgacaaagggataaaccagcaggagtgtcagttcgacttgcggcgaccagcgtgctgcgttcatttgcgcaagcagagttaagctgaatatttcaaccagaatgcgatgggtggtgtagatagcaatggtgttggagccaatcacattcagcaggctggtggagcgcataccgaatcgttgctcgtattgataaaacagcttcatgatcaccacaatcgataccagcgacaacagcagcgagatagtaaacaaccaggcaccgaccgccagaacggtaagcaaagaagccatcagcagatggcggcgcaacggcacctctttaacacaggtcattattgttgcgccaaaccatgcgccaaggctgtaataaggcaaattgcggatcacactgttcattccccaccacggcgtgggaacgaaattaaccgccacactcagcagtacaaacaaggcgaatagtggcagcgccagacggctaaaaattttacataccacgaaatagacaattaacgcatacagataccacaagctggtgctggcggtgatcatcccgtgcaggaactcaccggtggaatcggcataagcggcattggaggcattgcttaaatcgcgctcaggtgccagccactggttcagcgcacttaacgccagccactgcaccacgccccaaagcgccagcacccagaagatgttccagatccgtttatcgagacaatttccccacggtacgctgtcgatatagcggcgaatcaaatagccggatataaagaaaaaaaccggcatacgaaagggggcaaggtaaagattgaaatagatccagcatttgctcaggacttccgataacggatgctgaaaagtggtcagatgcggataaaaggtaatgaccgagtgataaatcaccaccagacaaatacataaccctttgatctggttaatccatagctctttttgtttcatcaggacaacacgctcttttttaatttacatgcggttgatcctgcgggttatgacccgaggtgtaatgggtatctgtctgtattggatgatttttcagattaagatcaggcggcaagattgatgataaaacatggcaatttagccgattgatttacgggggcttttcagattagccctgacgatcacttacagttcagacgtttacccatcttgctttcgcttatatactcgtgtctttgctacagcaaccagacggatttcatgtaccaacctgtcgctctatttattggcctgcgttacatgcgtgggcgtgcagcggatcgcttcggtcgtttcgtctcctggctttctaccatcggcattaccctcggggtgatggcgctggtcacagtattgtcagtgatgaacggctttgagcgcgagctgcaaaacaacatccttggcctgatgccacaggcaattctctcttctgagcatggctctcttaacccgcagcaactcccagaaacggcagtcaaactggacggcgttaatcgcgtcgcacctattactaccggtgatgtggtactgcaaagcgcgcgcagcgtggcggtcggggtgatgctcggtatcgacccggcgcaaaaagatccacttacaccgtatctggtcaatgtgaaacaaactgacctcgagccggggaaatataatgtcatcctcggcgaacaacttgcctcacagctaggcgttaatcgcggtgatcaaatccgcgtgatggtaccatctgccagccagttcacgccgatggggcgtattccaagccagcgcctgttcaatgtgattggcactttcgccgccaacagtgaagtcgatggctatgaaatgctggtgaatattgaggatgcctcgcgtctgatgcgttatccggcaggcaatattaccggctggcgtttgtggctggatgagccgctgaaagtcgactcattaagtcagcaaaaactgcctgaaggcagcaaatggcaggactggcgtgatcgtaaaggcgagttgttccaggccgtacgcatggaaaaaaatatgatgggtttactgctgagcctgattgtcgccgttgcggcgtttaacattattacctcactagggctgatggtaatggagaagcagggcgaagtagcgatcctgcaaacgcaaggcttaactccgcgacaaatcatgatggtctttatggtgcaaggggccagcgccgggattatcggtgcgatcctcggagcggcgcttggcgccctgcttgccagccagttaaataatctgatgccgataatcggcgtcctgcttgatggcgcggcgctgccggtggctatcgaacctttacaggtcattgttattgcgctggtggcgatggctatcgcgctgctgtctacgctttacccttcatggcgcgctgccgccactcaacccgctgaggctttacgttatgaataagatcctgttgcaatgcgacaacctgtgcaaacgctatcaggaaggcagtgtgcaaaccgatgtgctgcacaatgtcagtttcagcgtcggcgaaggtgaaatgatggcgatcgtcggtagctctggttccggtaaaagtaccttgctgcacctgctgggcgggctggatacgccaacctccggcgatgtgatttttaatggtcagccaatgagcaaactgtcgtcggcagcgaaagctgaactgcgcaaccagaagctgggctttatttatcagtttcaccacctgctgccggattttaccgccctggaaaacgtggctatgccgctgctgattggcaagaaaaagcccgctgaaatcaacagccgtgcacttgagatgttaaaagcggtggggctggatcatcgtgcgaatcaccgcccatctgaactttctggcggcgaacgccagcgtgtggcgattgcccgtgcgctggtgaataacccgcgcctggtactggcggatgaacctaccggtaacctcgatgcgcgtaacgccgacagcatcttccagttgcttggggaattgaatcgcttgcagggcaccgccttcctggtggttactcacgacctgcaactggcgaaacgtatgagccgccagttagaaatgcgtgatggtcgtctgacggcggaactgagcctgatgggggcggagtaatggcgatgcctttatcgttattaattggcctgcgttttagtcgcggacggcggcgcggcggcatggtgtcgctgatctccgttatttctaccattggcattgccctcggcgtggcggtattgatcgtcggcttaagcgcgatgaacggctttgaacgcgaactgaacaaccgtattctggcggtggtgccgcatggtgaaatcgaggcggtggatcagccgtggactaactggcaggaagcactggatcacgtgcaaaaagtgccgggtattgccgctgccgcgccgtatatcaatttcaccgggctggtggaaagtggcgcgaatcttcgcgcaatccaggtgaagggcgttaacccgcaacaggaacagcgtctgagcgcattaccctcgtttgtccagggcgatgcgtggcgcaattttaaagcgggcgaacagcaaattatcatcggcaaaggcgtggcggatgcgctgaaagtgaagcagggggattgggtgtcgattatgatccccaactcgaatcccgagcataaactgatgcagccaaaacgtgtgcgtttgcacgttgccggtattttgcagttgagtggtcaactcgatcacagttttgccatgatcccgctggcggatgcccaacaatatcttgatatgggttccagcgtgtcaggtattgcccttaaaatgacggatgttttcaacgccaataagctggtacgcgatgcgggtgaagtgaccaacagctatgtttatattaaaagctggattggtacttacggctatatgtatcgcgatatccaaatgatccgcgccattatgtatctggcgatggtactggtgattggcgtggcctgtttcaacatcgtctccaccttagtgatggcggtgaaagacaagagtggcgatatcgcagtattaagaacgctgggggcgaaagatggtttaattcgcgccatctttgtctggtatggattgctggcagggctgttcggcagcctgtgtggtgtgattatcggcgtagtggtttcactgcaacttaccccgattattgagtggattgaaaagttgatcggtcatcagttcctctccagcgatatctattttattgatttcctgccatcggaattgcactggctggacgtcttctacgtactggtcacagcattgttgctgagtcttttggcaagttggtatccggcgcggcgcgccagtaatattgaccctgcgcgagtccttagcggccagtaaaggcagtacattaaaacaaggagcggcaatgtattacgggtttgatattggtggaacaaaaattgcgcttggcgtgtttgatagcggtcggcagttgcagtgggaaaagcgggtgccgacaccgcgtgacagctatgacgcatttttagatgcagtgtgtgagctggtagctgaagctgaccaacgttttggctgtaaaggttctgtcggcatcggtattccgggaatgccggaaacagaagatggtacgctgtatgccgccaatgtccccgctgccagcggtaaaccgctgcgtgccgacctgagcgcacgtcttgatcgcgatgtacgccttgataacgatgccaactgttttgccctttcagaagcctgggatgatgaatttactcaatatccactggtgatggggttgattctcggcaccggtgttggcggcgggctgattttcaacggcaaaccgattaccggtaaaagctacattaccggcgagtttggccatatgcgtctgccggttgatgcgttaaccatgatggggttggatttcccgttacgccgctgcggctgtggtcagcatggctgcattgaaaattatctgtctggtcgcggttttgcgtggctgtatcaacactattatcatcaaccgttgcaggctcccgaaattattgcgctttatgatcaaggcgatgagcaggcaagggcgcacgttgagcgttatctggatttattagcggtttgtctgggaaatatcctgaccatcgttgaccctgacctggtcgtcattggtggtggcttatcgaatttcccggcaatcacaacgcaactggcggacaggctgcctcgtcatctcttacctgtagctcgtgttccgcgcattgaacgcgcgcgccacggtgatgcgggaggaatgcgtggtgcggccttcctacatctaaccgattaaacaacagaggttgctatgctgtcgcgtcggggtcatcggttaagtcgttttcgtaaaaataaacgccgcctgcgcgagcgtttgcgtcagcgtatttttttcagagataaagtggtgccggaagcaatggaaaaaccaagagtactcgtactgacaggggcaggaatttctgcggaatcaggtattcgtacctttcgcgccgcagatggcctgtgggaagaacatcgggttgaagatgtggcaacgccggaaggtttcgatcgcgatcctgaactggtgcaagcgttttataacgcccgtcgtcgacagctgcagcagccagaaattcagcctaacgccgcgcatcttgcgctggctaaactgcaagacgccctcggcgatcgctttttgctggtgacgcagaatatcgacaacctgcatgaacgcgcaggtaataccaatgtgattcatatgcatggggaactgctgaaagtgcgttgttcacaaagtggtcaggttctcgactggacaggagacgttaccccagaagataaatgccattgttgccagtttccggcacccttgcgcccgcacgtagtgtggtttggcgaaatgccactcggcatggatgaaatttatatggcgttgtcgatggccgatattttcattgccattggcacatccgggcatgtttatccggcggctgggtttgttcacgaagcgaaactgcatggcgcgcacaccgtggaactgaatcttgaaccgagtcaggttggtaatgaatttgccgagaaatattacggcccggcaagccaggtggtgcctgagtttgttgaaaagttgctgaagggattaaaagcgggaagcattgcctgatgcactacgcttatcaggcctgcaaggggacgcaattaattgaatttgcgggttttgtgggccggataaggcgttcgcgccccatccggaataatacacgcgcacttttccggcctcttttatcgtttactcgtcaataacaatgcggcaataaacgtacagacaccaattagccctgcccagagtggcgatattctggtaatcgcaaagctattatcgatatacaaacataaagcctgataacccatattggcaatagtcatcgccactgcaaattttaacgcataaataaaacgagtcgtgtagtaaaagatcctggaaaataagataaacgtcgcagcccaggcgataaaacctaatgtgttggtgctgccggggggagcattttcatgctgttgtcctggatgcggataatacgttagtggcggcgtcgattgttttaatatctgtgcttgtagaacagccaatgcattattgattccctgataccagagatctgcatttaaataagccagcgtgtgattttctatcagaaggccgagatgtttatcgtccagaccactttcaacctggccgttggtgatcataattaaccgtggttcgcgggtagtaaatagtaacagaacacttccttttacatcactcaatgaagatgacgcatgcgccagcatcgctttaccattttgtctgagactggcttcattattaatgtcgggtaaaaccacaataaacggtgcaattcccgtttgttggcgaaaaagctcggctttatgcgcgatctcttcagcatctggtacagtaccggtaacgtccgtaaaaagtgtcttcattattggaattaatggcttgctggctgctgtcagaggcaggagtatcagtaaactgagcagtataatgaattttttcatgggcgggacttccgtttcctgcgtgattttttagaggagggcatacttattaataaaccgacggcgataaaaataacgcccataatgccgataaacccccatttaaaaaaattaacccacgggttatttatctcagccttttcaggatgcccgggagaataataaacattaactttatcgccttcgctgtcttcataaaaatcgctgccgatactcgaattgaaaattagcgtgtaatctggcgtcggtcgaaaggcaacgacgggataccacgaaccatctttacccgtgcgatgagaatgactggagtgccagacggtatcaacaatgacgccttcggtatgaatcgcgtctttgctataggtgaactggttataaaagacaacaacagaaatgaggatcagtaccagaccgataccgaggaatatacgaaagaaaactttactgtcctgactcattagccacatccttgctaactaaaaaacgggcggtaataccaccgcccgcttgctgaattaacgtcctgctttcagcttctgataatactcttcataaatgctgctggctgcgccaacgtcattctgccattcgccatttttaatggtttcagcatccgggtagagtgttttatcgttcgccacttctggacttaacagcttacgcgccgcaaggtttggcgttggataaccgatagtttcagcaacctgttttgccacatccgggcgcagcaggaagttgatcaatttcagcgcgccttctttgtttttggcatttgccgggatcgccaggctgtccatccagaaaatgccgccttctttcggccacaccacgtcaattggcgtacccgcctggcgtgcaacgaaagcagaaccgttccagatcatgccgaggttaacttcgccttccatgtacgggttcgccgggttatcggagttaaaggctgccacgtttggcatcagttttttcagctcgttatatgcagcttcaatctctttcggatcggtggtgttaccggagtagcccagcttacgcagcgccatctggaacacttcacgggcatcgtcggtcaacagcaggctgcctttgtactctggcttccacagatcggcccagctggtgacagatttcggatccaccgcatcaccgttaacaccaatcgccgtcgcaccccagatatacggaatggagtagtcgttattcgggtcaaaaggcttgttgagcatgtctggatcgagattgctgaagtttgttaacttcgacttgtcgatcttctggatcatcccttctttacgcattttatcaacgtaataggttgaaggaaccaccagatcataggcaccgtctttgtatgttttcagcttggcgtacatggtttcgttcgactcgtaagtcgaatagataaccttaataccggtttctttggtgaactgttcaagcagtcctggcggcacgtactcggtccagttgtagaaatacagcgtgttgttgtcatcggcgtgagcggcgctcatgcccagtgccagagcacccgccgcgagcaggtggcgtgaccattttttcatttaacgtcccctgtgttacctttcgttttatcacgagcaataagctggctggcaataaccatcaccagcgacagcaccagtaatatggttgccagcgcgttaacttccggcgatacgccgactttgaccatcgaataaatttttaacggcagaatttcataacttggtccggtgacgaacgaagaaactaccacatcgtccatcgacagggtaaagcttaacacccagcccgccgccaccgctggcattgccagtggcagaatgatttttcgcagaatggtaaattcgctggcaccgagatctttcgccgcttccagcattcgcacgtcaaaacctttcaggcgcgaatacaccgtcaccaccacaaatggcaggcagaaggtgatatgcgagaacagcagcgaccagaagccaagctgaatacccagcagcataaacagcaccagcagcgaaatcgccatcacgatatctggtgacatcatcaccacaaacagcattccgctaacgaacggcttaccacgaaagcgataacggtacagcgcaactgccgtcagtgaaccgataagcgtagcaaacgtcgccgaaaacaccgccattgttagtgaatgctgcgctgcctgtaacaggctgtcgttgttcatcagcaggctataccatttggtggtaaagccctgccagttgatgccaaagcgcgagctgttaaaggagttcacaatcaaaataatgattgggatatacaggtacgcgtagatagcggtcataaaaccgccgcgaagcagtcgaccgatcattcgagttccaccttcttattcagcaaacgagaagcgcgccagtaaaccagcaacatcaggcccattacgatagtcagcgtaatgctggtagctgcaccaaacggccagtcacgaatattaaggaactggaccttgatgacgttaccgatcagcaggtttttcgcaccgcccatcaggtcggatacatagaacaggcccatcgctggcagcatcaccagcagacatccggcaataattcccggcatcgtcagtggaataatgatacggataaaagtctgtaacttgctggcaccgagatcgcgcgccgcctcaagcaacggcttatccagtttttcgatactggagtacagcggcatcaccataaacggcagcagaatgtaaaccagaccgataatcaccgcactgggcgtgaacatgatacggattggtgtgtcgataacgcccagccagagcaaaaactcgttgagatagcctttggtgctgaggaaaattttcagcccgtagatacgaattaatgagttggtccagaacggaacaatcagcagaaacagcagcagcggacgcaccttgtgtggcaacttcgccagaaaccaggcaaacgggtagcccagcaccaggcaggcgagggtggcgatcagcgccatattcagcgagtgcaatagcacttcaaaatagagcggatcgagcagacgcgtgtagttatccagcgtaaagaccattttgacaaaactggcgtcgtcgcgggtcaaaaagctggtgccaatgatcatcaggttgggcagaaagacaaacaacacaagccaaccgacaatagtgacaatcactacattctggaacttacttgtgttcttcatcagccagtacgacctcccagctttctacccaattaatggccattttttggtcgagagagtggtcaaagtcaggatcgtcttcattgaagaattcgctgaccatcaccatcttgccattttccagttcaacaaccgactccagcgtcatgcctttgtagttacgctcgcgaacgtaaccaatcagcccttcagcgtggttgtcgtcgttaatctcttcaacacgtaagtcttccgggcgcagcagaacatgcagtttttgccccggttcaacggcgaagttaacgtagatattacattcgcggccttcaacgttggcgcgtacgcgctgctcgtctagacgttcgatgacagtggcgttaaacatattgatttcgccaatgaagccggcaacaaacaggtttttcggctcttcgtagatttcacgcggcgtgccgtcttgctcaatgcgaccatcgcgcatcaccacaatcctgtctgacatggtgagtgcttcttcctggtcgtgagtcacaaagacgaatgtaatgccaagcttacgctgtaacgctttcagctcgttctgcatttgcttacgcagtttgtaatccagcgctgagagcgactcatccagcaacaacagacgaggcttgttaaccaccgcgcgagcaatggcgacgcgttgctgttgaccaccagagagctgatgcggtttgcgttgagcgaaggtttccaactgcaccatccgcagggcttccatcacgcggggcgtaatttcagcagcgggggttttttgcatgcgcaacccaaaggccacattttcgaacacggtcatgtgggggaaaagtgcgtagctttggaaaacagtgttcacatagcggttttccgccggaacgtgggtgatgtcctcgttatccagcatgatgcgtccggaatcaacagtttccagacctgcaatcaggcgaagaacggttgttttaccgcagccagaagggccaagcagcgtgaggaactcgccattgttgatagtcagatccagctggggaatgacctctttaccatcaaagcatttgcgaattcccgccaattgcaccagcggtgaaagcgaactcggttgtttattcaattttttactctgtcccatgtaaacgcaacggatggcttaccgatgcggggtttgtggttaaccaccttggtgactcttaatgagggcggtaattctacggcaaaccgcttgaatcgccaatctttgttgtgaattactggcttagctttatattcattaaggtaatgctgataaatattcccgcttgcaggggtaaaagtgacctgacgcaatatttgtcttttcttgcttcttaataatgttgtcacaaaaagtgagggtgactacatggataaactacttgagcgatttttgaactacgtgtctctggatacccaatcaaaagcaggggtgagacaggttcccagcacggaaggccaatggaagttattgcatctgctgaaagagcagctcgaagagatggggcttatcaatgtgaccttaagtgagaagggcactttgatggcgacgttaccggctaacgtccctggcgatatcccggcgattggctttatttctcatgtggatacctcaccggattgcagcggcaaaaatgtgaatccgcaaattgttgaaaactatcgcggtggcgatattgcgctgggtatcggcgatgaagttttatcaccggttatgttcccggtgctgcatcagctactgggtcagacgctgattaccaccgatggtaaaaccttgttaggtgccgatgacaaagcaggtattgcagaaatcatgaccgcgctggcggtattgcaacagaaaaaaattccgcatggtgatattcgcgtcgcctttaccccggatgaagaagtgggcaaaggggcgaaacattttgatgttgacgccttcgatgcccgctgggcttacactgttgatggtggtggcgtaggcgaactggagtttgaaaacttcaacgccgcgtcggtcaatatcaaaattgtcggtaacaatgttcatccgggcacggcgaaaggagtgatggtaaatgcgctgtcgctggcggcacgtattcatgcggaagttccggcggatgaaagcccggaaatgacagaaggctatgaaggtttctatcatctggcgagcatgaaaggcaccgttgaacgggccgatatgcactacatcatccgtgatttcgaccgtaaacagtttgaagcgcgtaaacgtaaaatgatggagatcgccaaaaaagtgggcaaagggttacatcctgattgctacattgaactggtgattgaagacagttactacaatatgcgcgagaaagtggttgagcatccgcatattctcgatatcgcccagcaggcgatgcgcgattgcgatattgaaccggaactgaaaccgatccgcggtggtaccgacggcgcgcagttgtcgtttatgggattaccgtgcccgaacctgttcactggcggttacaactatcatggtaagcatgagtttgtgactctggaaggtatggaaaaagcggtgcaggtgatcgtccgtattgccgagttaacggcgcaacggaagtaagcgaaaagggatgcggcatgtgatgccgcatccggcttaaatccaaacttacccttcgaagaaccaatacccgctattgaccagcgccgcgagcatcgcgaggaatgacggatcttccagcgcatcgccaaaattctccgcagtcagcgcaatgttgctggcgagtgcatccagtgccggacggtgcggggaatcgatcttctcaccattggcatacacgtcgtcgccaatgcgcaatacgcgcagaccacccaggcgcaccagcacttcaccttgtttcagcgcatcgtagatttcatccggctgataaggcggctctggcggcgcgatatccagttcatgacgtgactgggatataaactcgccaaaccattgcttaaagtgttccggctggttgatcaattcgagcatcatctcacgcagtttatccatctcttgcggcagaacatccgcaggatgagcgcgaggtggaacatccggatcgctgtagtagttgccgcccagttcacgttgcagcacataatcggcaaatccactaatcagttcccgcgtatttggcgcgcgaaagcccacggaatagttcatcgcattttccagcgcgtagccttcatgcgggaatcctggcggaatataaagaatatcaccaggctccagctcttcatcgatgatggcttcgaacggatcgacctgtaacagatccggatgtgggcagtgctgtttcatttgcagcttttcgcccactcgccagcgacgacgtccggtaccctgaatgataaacacgtcgtactgatcgagatgcgggccgacgccgccgccgggtacagaaaaagaaatcatcagatcatcaatacgccagtccggtagttcacggaacggtcgcatcagcgcggcggtcggctcatgccagtggttcactgcctgtaccagtaatgaccagttggtttcaccgagatgatcgtagctttcgaacgggccgtggctgacctgccatttgccatcctggtgactgaccagtcgactgtcaacttcgctttccatcgccagacccgccaactcgtctggagagatcgggtcaataaaattattaaagccgcgttttaacaccaccgggcgtttctgccagtgacgttcaagaaaatcgggccagttaagagtgagttggtattccatgttaagcatccacaggctggtatctgcaaccgattataacggatgcttaacgtaatgcgtgaagtatgggcatatttattcatctttcggcgcagaatgctggcgaccaaaaatcacctccatccgcgcaccgcccagcatgctctctccggcgacgattttaccctcatattgctcggtgatttcgcgggctaccgccagccctacaccttgcccagggcgtaaagtatcaacccgttgaccacggtcgaaaatgacctctcgcttgcttaatggaataccggggccatcatcctcgaccacaatatagagatgctcgtcggtttgccttgcagaaatttcgacaaactcgaggcaatatttacaggcattatccagcacgttgcccatcacctcgacaaaatcgttctgctcaccgacaaagctgatctctggcgaaatatcgagagagatattgacccctttgcgttgatacactttgttcagcgctgaggtgagattgtccagcagtggggcgaccggatgcagctcgcggctgagcaatgtcccgccgcgcatactggcacgatgcaggtagtagccaatttgctgtgaaatgcggctgatttgctccagcattaccggctcagcatcactgacgctcatcttttcactacgcagagaacgcagcgtactttgcagcaccgccagtggcgttttcagactatgggtcaggtcggtgagcgtcgtacggtatttgtcgtaacgttcgcgttcactttttaacaatcggttcaggtttcgtaccagactggtcagttctcgcgttgtggctggattgagcaattcgcggttatgttcttccagttcgcggacttcttttgccagggcttcgatggggcgtaaactccaccaggcggcgacccacagcagcgggatcactaacagcagattggctgagagcacatagataaaccagctccagaccatataggaactttttagctccaccggaatggtatccaccaccacaatggttaattttggcatccgcgatgttgccgggtagacgtttactgccaccgagtgggtcatctccgcgtcgtcatcatcttcccgcacttcctgcaactgttgctgtatcgaatgatctccactcagcaagaggctggtatcgttaacatccgcttcaatttcatgaaaaccattcgatttcagccagtcaggctggatcatcttcatcagccagggcacgtcacgttgcgcccataaaagctgcccgttctcatcataaattagcgtcatggtggggctttgcttgtcgatattttcgggtaactcgacatgcaacttattgttttcccacttcgcaagggtatagaacagattgctctcgccacgtaacagccgaaacgtagttttatcgaaactgacgctataaccgatcagcgcgaccattccgtaggcaagcgaaagcaccagtactaccgctgccgttgccaacagaaaacgtacccgcagcgagagcgggaaaaaaagacgcagtaattttttcatcagcgcaattcgaacagatagccctggccgcgaacggtggtaatcacttcttggggatattgtgcctgaatttttttgcgcagacgtcccatcagtacatcaatggtatggctttcccgcagctccgcatccggatagagttggagcattaacgaatctttgctgaccactttgccattattgcgtatcaacgtttccataatagtgtattcgaacgcggtcagtttgatcacttcgtcattaatagataattcacggcgagagagatcaacctgaaacggggggagcgaaatgacctgtgaagccagaccgctattacgccgcattaatgcctgcattcgcgccatcacctcttcaatatgaaacggtttagtcacataatcatcagcaccggcacttaatacttcgactttgtcctgccagctttcacgggcggttaataccagaatcggcagtgaaacatcgttgctacgccagcggcgaatcagtgacagaccgtcctcgtctggcaatccgagatcgacaatcgcaatatccggtatatgttcattgagataataatcggcttctttggcatcttctgcgtcatcgacctgatgaccagcatcctgaatctgaactttaaggtggtgacgtaacaacgcattgtcttcaacaaccagtacgcgcatttttatttctccctgtcttaattattaaaatagtgtaacgcgattatgtggttatgggggtaaacattaaataaaccagcggggaggggaggtaaagtgaaaaaataaaaagcggataatcttaataagcaggccggacagcatcgccatccggcactgatacgaggtttatttcagctcatcaaccatcgtgatagctcgaccaatatagttagccggcgtcatcgctttcaggcgggctttctcttcttctggcaacgccagaccatcgataaactgcttcatgccttcggcgtcaacgcgcttaccgcgagtcagctctttcagcttctcgtacggtttttcgatgccatagcgacgcataactgtctggattggttcagccagcacttcccagttgtgatccagttcatccagcagatggtcacggttcacttccagtttgctcacgcctttcagggtggattgatatgcaatcaaggcataaccgatacccacgccgaggttacgcagcacggtagagtcggtcaggtcacgctgccagcgggaaaccggcagtttgcttgccagatgctgcaataccgcgttggaaaggcccagattcccttcggagttttcgaagtcgatcgggttaactttatgcggcatggtggaagaaccaatctcaccagcaatggttttctgtttgaagtggttaagggcgatataaccccagacgtcacggtcaaagtcgatcagaatagtgttgaagcgcgcaacgcaatcaaacagttcggcaatgtagtcgtgcggttcgatctgggtggtgtacgggttccactgaatacccagcgaggtgacgaactcttcgctgaactgatgccagtcaacttccgggtaagcggcgatgtgggcgttatagttaccgaccgcgccgttgattttgccgaggatctccacctggttaagctggcggtactggcgctccatacggtaggcgacgtttgccatctctttaccgatggttgacggcgtggctggctgaccgtgggtacgagacagcagcgggatatcgcgatactgaacggcgagatctttaatgccatcaatcagttgacgccagtatggcaggatcacttcatcacgcgcggttttcagcattaatgcgtgggagaggttattgatatcttccgaagtacaggcaaagtggatgaattcagaaaccgcgtgcagttccgggatctccgccactttttctttcaggaaatactcaaccgctttaacgtcgtggttagtggtacgctcgatagttttgatgcgcgccgcatcttcttcgctgaaactggcgacgattgcatcaaggtaaccgattgcgtcggcagcaaaagcaggaacttccttgatcgctgcgtgcgcggccagtttttgcagccaacgtacttcaacttgtacacggaatttcagcaaaccatattcgctgaaaatcccgcgcagcgcgctgactttatcgccgtagcgtccatcgacaggggaaacggcggtcagtgaggataattccatagatcacaactccggggttaaatgagcaagaatttgttttgcctgagtggtcaggcgattacgagaaaacatcagttgcagacgtccgccgccgacctggtgccagagcacggcggcgcgaatgcctgccagcagggttgcgcgaactttcgcctgcacttgtgggctttgcagtacagcaggggaaccggtgacctgaatgcgcgggccaagcgggctaatcacatcaacatagatagcagccatcgcgctcatcagcgtttcggactgtaaatcgaagtgttcgagctggcgttgcaggccgttgatccggttgcccagagtgtcgagcgcgcctttcgctgaggagagtttgcgctcaagcaccatcaagctgagtgtgtagcgggttaattcggcgtttaagccctggcgactgctggcattgagcacgccgagcagggtttccagcccgacgcgcaggttggcttcgctaccgccaaaaaccgccagcgtcgagctggggttcatatcaataatactgttgagtgagacgtgtagcgcatcggcatcacaatgcccctggtgagcgagttgttgcaccaggcgtgccgactgacaaataccggccagggcgagggtgatgtcatagtaattctttgccacgttcactgcttccttgttttaagtaaagataataatcagaccggcagcggcagacgctgctcaataataccgccaccgaggcacacttcaccgttatagaagacggcagactggcccggcgtcacggcggcaaccggttcatcgaaaatcacttcaatgcgatcatcgtccagcgccttgacggtgcaagggatatcggtctggcgatagcgggtttttaccgtgcaacgcatagtgccggtgaatggttcgcgatcgacccagtgcaactgctgggcaatcaacccgacagacatcagccgcgggtgttcatggccctgagcgacaaccagaatgttgttttcgacgtctttgtccaccacataccacggttcttcggtaccttctttggtgccaccgatacccagacctttacgctgaccgagagtgtgatacatcagcccctggtgctcaccaatttcatcgccatcgacggtaatgattttgcccggttgcgccgggagataacggcccaggaactcgcggaatttacgttcgccaatgaagcaaatgccggtagagtcttttttcttcgcggtgaccagaccaagatcttcagcaatcttacgcacctgcggtttttccagttcgccgaccgggaacaggctttgcgcaatctgctcatggctgagcgtataaaggaagtagctctggtctttattgctgtccagaccacgcagcaggcggctcttgccatcgacatcggcccgacgtacgtaatgaccggtagcgatataatcggcacctaaatcttcggcggcaaattcgaggaaggctttaaatttgatctctttgttgcacagaatatccggattcggcgtgcgaccggctttatattcggcaaggaacagttcgaagacgttgtcccagtactcggcagcaaagttaacggtgtgcagttcaatgccgagcttgtcgcagacagcctgggcatcagccagatccgctgccgctgtgcaatattcctcaccgtcgtcttcttcccagttcttcataaacaggccttcgacctgatatccctgttgttgcaacagccaggcagaaacggaggaatcgacaccgccggacatgccgacgattactttttttgcggtttcagacattggatcactcacgacattgaacttcaaggcggcgtattctatcacgcagccttttagatgacaccctttgtaaaaggccagttaaaatcgccaatcatctccagcggataacgttgcccgctttgataacaacgaatactttccgccaccagcggcgaacgaagatttgacgcctgtaaaatttcttcggcgctgacccaacggcagcagtcgatatcgctgtcatgaggctgggtcgggcatatttgctcaagctcaatggcaaagaggaaacgcaaaaacggcgttttatctggcgcaatccactgatgcatacgaataaagtgttgcggctgcgcgctgatgccggtttcttcccacagttcacgggcggcggcttccactaaggtttcatcggcttccagatgcccggcaggttggttccataacgctttaccattaatcgtctcttcaacgactaaaaatttgccttctgcgtgcaccacgcaagcaacggtaacgtgcggtttaaacattttgcatccttaatctgtcacttctcgccattcaccattggcaagattatccaaagagtaatcacccatcgcatagcgaatcagtcgcagcgtggggaagccaacatgggcggtcatgcggcgcacctggcgattacgtccttcatataaggtgatcttcagccagctggtgggaatacttttgcgttcacgaattggtggattccgcggccataaccacgcgggttcgtcaaccagctccgcgccggcgggcagggtagggccatcatttaaggttacgccattgcgcaaggcttcaagtgcgtcttgtgtgggaataccttccacctgcacataatagatttttccggtgcgtttacccggctgggttaaacgcgcctgcaacgcgccgttattggtcagcaccagcaacccttcgctatcgcggtcaaggcgacctgctgcataaacaccctgaaccgggatgaattcttttaatgttttgcgtccggcttcatcggtgaactgcggaagaacatcgtagggtttattgaacaggatcacacgcgtgggctggttttcaggtttacgcctggtagaacgttgcgagctgaatcgcttaacctggtgatttctaaaagaagttttttgcatggtattttcagagattatgaattgccgcattatagcctaataacgcgcatctttcatgacggcaaacaatagggtagtattgacaagccaattacaaatcattaacaaaaaattgctctaaagcatccgtatcgcaggacgcaaacgcatatgcaacgtggtggcagacgagcaaaccagtagcgctcgaaggagaggtgaatggaaagtaaagtagttgttccggcacaaggcaagaagatcaccctgcaaaacggcaaactcaacgttcctgaaaatccgattatcccttacattgaaggtgatggaatcggtgtagatgtaaccccagccatgctgaaagtggtcgacgctgcagtcgagaaagcctataaaggcgagcgtaaaatctcctggatggaaatttacaccggtgaaaaatccacacaggtttatggtcaggacgtctggctgcctgctgaaactcttgatctgattcgtgaatatcgcgttgccattaaaggtccgctgaccactccggttggtggcggtattcgctctctgaacgttgccctgcgccaggaactggatctctacatctgcctgcgtccggtacgttactatcagggcactccaagcccggttaaacaccctgaactgaccgatatggttatcttccgtgaaaactcggaagacatttatgcgggtatcgaatggaaagcagactctgccgacgccgagaaagtgattaaattcctgcgtgaagagatgggggtgaagaaaattcgcttcccggaacattgtggtatcggtattaagccgtgttcggaagaaggcaccaaacgtctggttcgtgcagcgatcgaatacgcaattgctaacgatcgtgactctgtgactctggtgcacaaaggcaacatcatgaagttcaccgaaggagcgtttaaagactggggctaccagctggcgcgtgaagagtttggcggtgaactgatcgacggtggcccgtggctgaaagttaaaaacccgaacactggcaaagagatcgtcattaaagacgtgattgctgatgcattcctgcaacagatcctgctgcgtccggctgaatatgatgttatcgcctgtatgaacctgaacggtgactacatttctgacgccctggcagcgcaggttggcggtatcggtatcgcccctggtgcaaacatcggtgacgaatgcgccctgtttgaagccacccacggtactgcgccgaaatatgccggtcaggacaaagtaaatcctggctctattattctctccgctgagatgatgctgcgccacatgggttggaccgaagcggctgacttaattgttaaaggtatggaaggcgcaatcaacgcgaaaaccgtaacctatgacttcgagcgtctgatggatggcgctaaactgctgaaatgttcagagtttggtgacgcgatcatcgaaaacatgtaatgccgtagtttgttaaatttattaacgggagcgtaacgctcccgttgttttttgttaggctgctaacggttatcaaaattttatcaaaaaaagttatcaaaacccctcggtagttttggggtaggctggccggtcaggtggtagttctactactagtctcccacatagatattccttagctttttattattgctggcggacgctcgttaatatttaaggtcttcattgattaagacatccccaaagttagttatgtattcactgttattaggacaattatgaattaccactccttacacccgctcaaatattgttaaattgccggttttgtatcaactactcacccgggactcgccaggggacagccaacaggcattgggtgcaatcaccttagcgttcaggtacatgcggaatgtaaaaaaggccgcgagcgcggccccttcacatacatctttagtactgagactgtttaacctagggaattattatcgtattatattgcattacaactcccaacagtgacatatgaacttcctgctttactccacgactttaatatttcaaggccatgtgaagaacatatttcttgcactgcgagttcatcgagtaatccatagtaagaaacactttttgaatttttgtaaatgtatccgtaaagatgttttcttcctgtttcgtattttttgaagtatgagcttttatattgatttacaataagagtctcacctcctgattttagtaatctcttgatgctaagaactattttgtcgattgtatcccgacaaggaacggcagagagaacattagagcaaaggatgaaatcgtaacccccaattattttgtcgacatcctcgaaagcaactgtatttgcatttttataatatcgtgggacatagtcaataattttagttttaattcctctaataatttgctctctttcaagttgccttttcgagtctagaaaagtaacttcatcaaatttactgattaattcatcagaatatctaagttttccgcagccaaaatcaagggcgtggccatttttctcaatgcttctaatatactcgcaaagatatctagagggcatcgtatgaggttttgctgcattctctgagcgaatattaactccgtgcatattatagttcaaagcaagtaccattcaattaatgttatttttagtgaaaaattcttttattttatcgtccgggatttttccgacttgactttcagttctgggcttaactgtcaaagcaaagataataccactcactgagaatgataaaattacaaaaaagaataaagacagcaaagaaccttcaacatgaaaaatatccatttgtttgcaaaaaaagattattaggaaggaaattaatgcaattatcgaaaattcaaaaaatatccaaaaatagtatactttattccagaagagttcaatataatgtttgtcttcaatttttcttacttcagggtaatatagattgctcattacattgtgagcttcatctttatttaattttctgttgactccagctctccgtgataacggttttataattagatgcttatcccaaagatatcgcacccgaagtagtttggctgcattgttatgtaggtctaacgcaccgctaattaaatatgcaaaaatcgcaaaagcacaaggtaatataccaaaagatagtgcccaattaataaagctctcatgatctttaataggtgggacatacttggttggtaatgttattaaagggatgtattcgtaaataactagaagtatgcaatatattagcgtatttaagaaagttgctttatgaagtttaggcaacatttcattataatttttggggggttcgaacatattattcacctgagtcacgctttaggatagtgtaatggtaatatttaattaagtgtcattatatacttttcagtaggttagttacaattttttgtatctgttcaggctgacctagcttcgctgacagacaatattgtgatcagtagcacgtatcgaggaggagtagcgctacaaatttgacgctgggtgagaatctgaaattgatagaaatgaaataatgaaataatgaaatgatgaaatgatgaaatgatgaaatgatgaaatgatgaaatgatgacagagtgtccagtgggcacggatggtgtcttacgacatgcttaccttaatcgttcccagtgtgcctatagcagatattctaaacatgtcgataattcattacgcatatagtatcgaacatagaaaaaactgaagattcatcttattttgtatatactacctagcccaacaatgtagaggttaacgaaaaatgcgctcaccaatttgtcatcttttctcagcaattaattcatcaccatttaagattgcaccagagaaggagcaagatcttaaaacgatagttgacgacaaaaaaattataatttcagttgtgagtgaacctggttttaatatccgagtcaggaagaatgagagtaataattcacatgaaatagttctaacagtagcttcacttgaatatatttgggcattttccaatttcttttgggtttttacgcaagagtactccaaatctcagaaaaataatgatgagcactttgatttaacaggaaaaaataggcttaaaaagtctgatgaacttcttaaatgggcaaggaaaaacttgcaaacaacaggttgcgaatcatggcctaaaaaatgtcccaagccagaagcatatttacaaggaagcgaagactcacaagttgctagcgagatatttctttgtgctattgcttggattcttcatcatgaaataagtcatgttgttttacagcatccattggtcactacagcattctccactcaagaggagcgtgaagcagattcacatgctacaaaatggatattaggcaacctgtatgaatccgctcctgaattaaagaaacgtgcacttggcattgctacggcagtgctttgtatacaaagcttagaagttgaaaattacttctgtttacaaaatacacacccagctgcatatgagcgtatatattcgaatatttcatgctaccctgtcggaaatgaagagttgattgaagctctatgtacagtgatgcttcaatatcttttccatggcaaaaatatcaatgtgaatctagatggggagtccttttcatcgattttaggtgatcttctctgtgatatttcacgtcttaccagtaactgatatggctgtccgccgctcgcttaaagtggactttttagtttttatcatgtgcggtgagaaattcaatgtggcgttgagatgcttaaaggttcacaacgctactttgctccatcctttacctcgatcatcatgataacgatcggtttgttgttgtgttttatgaccaagtagtttttgtgtgtctaacccctgttctttatacagacgttcagataaagacctttgctcatggaatgtcgcaggtgaaccctctccccagtcaattcttgctaaatctctcgctttactaaaattcatcgtcaatgtattggctttaacctgcgctccgcgctctgcttgtgaagttgaacgaaaaaaatgcactaagtatgcactgactgcatagtcacggcagcgggctactacatcgcgtaaactccagttaatcgcattgaggcgaagagaaagaggaattgcgattttgctcccggtcttttcctgaatgacatgaagatgatcatcccaaatatcgctaaatttcatacgcgaaatatcacctaaccgctgaccagtaaccagcgctaacagcatggcatttcccatgtaacgatgagtagcgtctgcgatatcgaagatttttttccattcttcaaggctcagccgttgtcgggtaatttttcttcttggttgtttagtggctaatgctgggttatagccaggaggtacttctccgtagtgctgcgcctctttgaaaacatcaatcaggacggagcgaactacttgtgccattcttggccgcccagcggcgatatactcatcaagcaattgtgctatatctctgacatcaacggctgagatcaacttcattcctgctcgttctctgagcaaggatactggtttagctttttgtttataggtgttgagtcttatatcaccacttttaagcctgtcatcctggatcgcttgatagcgatctaaccaggttgacgttgtgatagcctttcctttgctggttgcgatcctgtcactgatagccagaatctgccgggttctttgttcagccaggcgagtgttggcctcagtggcaatagcgatagcttcagcttcgtttgttcccaaagcatggaattttcctgtcactggatgcttataccgccaatagactttatttaccttcctactataaagcggatataagttagggactgaaacattattcttacgcggtctggctgccattactcaaaatccgttgcaaaagtaatgagtcatttttcttgattacaggtgttaccaactccccaactaactcggcgtcctcacgcactcgccataaccggccttgtttcatggccggtggacaaaataaattctgcttagcataacgacgcaatgtggacacacttggaggattacttctgtatttttcagcagcccattcttcaagagttaacatttgaagcatatgcgatcaccttattactacactaactgcttagtctcagcatatcgaccctgcacggtcggttagtttctccacaaaacagagaagagcacctgtggccacagctatcaggatgggtcgggttattaacccgtcatccggggatactcttctctgttttgtaaaaagggcggtaccagaaaggactaaggaaaaaactggtaccgccaagactacacacagcataaagttgtggtgtcgggtgcccccggtgcctggcgaaggttgcacaccaggcgggtgggtatccacagaaggtcgattgtcagcctcaaccttaacccgcgtgcgctgagccgcattcaccacaacgctaaggattctctctggttgaaaatacttagctgttatgtgcctgtcttttcaccacttcaggctcggtggtatgctggagttctcacacagccagcaagcaaggaaacttaatgaaccagttttatgttcacgttcgtctatttgaagacacagccgaacagaccaaaaaatttgaagaattaatgcttaactttctgtaccagaaaacagttaaagagtctgacgatagctgctgcagactgattccagagggatatatcctcaaaagtacaatgaactgccaacaaatccttgatcaaacattttcaattgctaacagtgccggtgttgacgcaaatatatttgtctgtaaatttgaacaaagcgcatgcttacttccgtctgcttccttagttggtaacgatttcgttcattacgatcttacgcctaagcccatcaagctcgattcttaaagccttaaccattgtgtcgtgataaacacggctcaccttctctccattgcatggcagaggggtgagtgtgttagccatgaaattcatgaactcggttcgaccaggggcttgcgccccgcaagtctttaatgcctgttttgctaacaaaatgcgggcctcagtgcctgcatttggctctatctgctgcaaacgtttagcgtcttccagcaacaatgcgatcacatgcttcaaattctgctcattcatctattctctccactgaaatcatccgctaacgaatcatcccggtcttcgtacgtaccgggcgggctacttcgtgggcgtcctgcctgtttgttgtttctcttgggtacattatgtatctcaaaggtacattgtcaagtataaaaaaacctgccgaagcaggttcataaacattgattaggctttgattttgtatcttcttggttttcctgagaaaatcacagtaccaattatagagcaattaccgttgatcttaatgtaaggctcaggccagtttgggtttaacgctttgagataacgctgtgtcccatcttctatcaaccttttgaaggtggtttcacctgtatcgtgcatcaatgcaataacgtcgtcaccgtggcaggcaggtacttcaggatcgacaaaaatcatgtctcccgggcggtactcatcaatcattgaatcacctattacccgcaagatataagtcatttccccacagggtacagggcagggatacgtttctgctgtgctcaaatcaacctcagaatatccaacttctttccatgctccggcctgtacccatgatatgacagggactaatgtgatttgtttattagtgattgaaacatcaggtttttttgtgatgttcgttgtctggtgttcttgatcgagccatcctacaggcaggtcgaaacatttttcgatgtgtcgtgccatgctgtcaccgatatttttagtagcaccatctcccataaacctgctggtctgggttggctcgcgatcaatcatagtggcaaaggaagaattcccgccaacaccatctctcagttttctggcgttagaccgccggatgtcatggattgttttcataacgaaattaaaacccttgtaccgttaaggtacaagtatcttgaaggttcatttcaatcatgtaatatgtacaccggaggtacatattgtatgaaagcgtattgggactctttaaccaaagaacagcagggcgagttggccggaaaagttggctcaacacctggctacttacggctggttttcaatggctataaaaaagccagttttgtgctggctaaaaaacttgagcaatacacatcaggtgcaattacgaaatctgacttaagaccggatatctatccgaaagattagcagaacactttcaatttttaaccacagaacgatgaggctaatcgtgggtaagcatcactggaaaatagaaaaacagcctgagtggtacgtgaaagctgtcagaaaaactatcgcggcgttgccgagtggttacgctgaagcggctgactggctcgatgtaacagaaaacgctttattcaaccgccttcgtgcagatggcgatcagattttcccgctgggatgggcaatggttttacagcgtgctggtggcactcacttcattgctgatgctgtggcgcagtctgcaaatggcgtctttgtgtctcttcctgacgtcgaggatgtggacaacgccgatattaaccagcgtctgctggaagtcattgaacagatcggcagttattcaaaacagattcgttcagcaatcgaagacggtgtagtggaaccgcatgagaagacagcaattaacgacgagctgtatctctcaatttcgaagctgcaggagcatgcagcacttgtctacaaaattttttgcatttcagaaagtaatgacgcccgcgagtgtgcagctccgggcgtcgtggcgtcgattgcttctggttgtggagaaactaacgcatgaacagtttaacaacacactaccgtcgctcgcaactgattgcgcttcctgtaccgggtggaaaagcgaaggtggaatattgctatgcagtgaatgtaccaggtgacagggaaattgtaacccacagctttgcagagtgggctgtgggtgatttcaaccggcagaaggagacagtcctttgcgacaagttaaccgctggttcaaagatcactacggagtgcccgtcagagtcattcgttgggagccggaaacacaacgggttatctacctccgcgaaggttatgagcatgaatgcttcagcccgctcgaacagtttcgtcgtaaattcagggaaatagaggtcggtcatgagcactaaattaaccggctatgtatgggatggttgcgctgcatcaggcatgaagttatccagcgtggcaattatggcccgcctggctgatttcagtaatgacgaaggtgtgtgctggccatcaattgaaaccattgcccgtcagattggcgcggggatgagtaccgtcagaacggctatcgcacggctggaagcagaaggctggttaacgcgtaaggcgcgtcgccagggtgatggttcatcaccccactgtgccgtggtggatgaatatcacgagcacgccacagatgcgctttacaccacgatgcttaccgggatgggggcgcgacgccagccactgatgtgggccattaccaccgccgggtacaacattgaggggccgtgctacgacaaacggcgggaagtcatcgagatgctcaacggctcggtgccaaacgatgaactgttcgggatcatctataccgttgatgaaggtgacgactggaccgacccgcaggtgctggaaaaagccaatccaaatattggcgtgtcggtttatcgcgaatttttgttaagtcagcagcagcgtgcgaaaaataacgcccgtctggcaaacgtctttaaaacaaaacacctcaatatctgggcgtcggcgcgttcggcgtatttcaacctggtgagctggcagagctgcgaggataaatcactgacccttgagcagttcgaggggcagccgtgcattctggcctttgacctggcgcgtaagctggatatgaacagcatggcgcgactttatacccgcgagattgacggtaaaacgcattactacagtgtggccccgcgtttctgggtaccgtatgacacggtgtacagcgtcgagaaaaatgaagatcgccggacagccgaacgctttcagaaatgggtggaaatgggcgttctgaccgttaccgatggtgcggaggtggattatcgctacatcctcgaagaggccaaagcggcgaacaaaatcagcccggtcagtgagtcacccatcgaccccttcggggcgaccgggctgtcacatgaccttgctgatgaagacctgaaccccgtcaccatcattcagaactacaccaacatgtccgatccgatgaaagagctggaagcggcgattgaatcggggcgctttcatcatgacggcaatcccatcatgacctggtgtatcggcaacgtggtcggcaaaaccattccgggtaacgatgatgtggtgaagcccgtcaaggagcaggcggaaaacaaaatcgatggtgcagttgcgctgattatggcggttggcagagccatgctgtacgagaaagaagacacgctgtctgatcacattgagtcctacgggatccgctcgctttaactgaggtaattatgatcatgctgattctcgcgcctctggtgggcgtgctgggtgcgcttttgctggcgtatggtgcctggctgatttatcccccggcgggttttgttgttgccggggcgctgtgcctgttctggtcgtggctggtggcgcgatatctcgaccgtacacagtcgtctgtcggcggaggtaaatagtgttcttttcgggattatttcaacgaaaaagtgacgcaccggtgaccacgccagcagagctggcggatgccatcgggctgtcgtatgacacctataccggaaagcagatcagcagtcagcgggctatgcgactgacggcggttttttcctgcgtcagagtgctggcagagtcggtcgggatgttgccctgcaatctgtatcacctgaacggcagcctgaagcagagagccaccggcgaacgtctgcataaactgatctccacgcatcccaatggctatatgacgccgcaggagttctgggagctggtggtcacctgtctgtgcctgaggggaaacttttacgcctacaaagtgaaagcatttggcgaagtggctgaactgctgcccgtcgatcccggctgtgtggtatatgcgctgggaaggtgtcagcgatggcctgaaggtgaccgccgggagtgttattcagcgcgatgacctggtgcagtacacgacaactgacgatgcaaccagctccggtggtgtcctgcgcgtgccgatcgcctgctcaagtgcaggtgcggtcggtaacgctgacgacggtacggcattaatcctggtcacgccggtgaatggtctgccgtcttccggtgtggctgacaccctgacaggcggatttgatactgaagagctggaaacgtggcgcgcccgcgtcattgagcggtattactggacgccgcagggcggggctgacggggactatgtcgtctgggctaaagaagtgcccggcattacccgcgcatggacataccgtcacttgatgggaacgggaactgtcggtgtgatgattgccagcagtgacctgattaatcccattccggaagaatcaacggaaacggcggcaagacaacatatcgggccactggccccggtggcaggctctgatttgtatgtgttcaggccggtggcacatacggtggattttcatatccgcgtgacgccggacacaccagaaatacgggctgccattaccgcggagttgcgttcgttcctgctgcgtgatggttatccgcagggagaactcaaggtatcgcgtatcagtgaggcgatttccggtgcgaacggggaatacagccatcagttgcttgcaccggtggacaatatctccattgcgaaaaacgaactggcggtactggggacgatttcatggacgtgacaaacgatgattacatccgcctgttatcggcactgttgccgcccggtccggtgtggtcagccagcgatccggcgattgccggtgcggcaccgtcattaacccgtgttcatcagcgtgcggatgccctgatgcgggagctggatccgcgcaccaccactgaactgataaaccgctgggagcgtctgtgcggtctgccggatgaatgtattccggcgggaacgcagacccttcgccagcgtcagcaacggctggatgcgaaggttaacctggcgggcggcatcaacgaggatttttatcttgcacagcttgctgccctgggcagaccagatgccaccatcacgcgatacgacaaaagcactttcacctgctcatcggcctgtactgacgcggtgaatgcgccggaatggcggtattactggcaggtcaacatgccagccaccaccaactccacctggatgacatgtggcgatccctgtgattccgcactgcgtatctggggtgacaccgttgtcgagtgtgtgcttaacaaactctgcccgtcgcatacctacgtaatttttaaatatccggagtaatccatgcatcgtatagacacgaaaaccgcgcagaaggataagttcggcgcgggtaagaacggttttacccgtggtaacccccagaccggcacgcctgccaccgatctggatgatgactactttgacatgttgcaggaggaactttgcagcgtggtggaggcatccggtgccagcctggagaaggggcggcacgaccagttacttaccgcacttcgcgcgctgctgttaagccgcaagaatccgtttggcgatatcaaatcggatggcactgtgcaaacggctctcgaaaaccttggtttgggagaaggagcaaaactcaatgcagcaacggctacattaggacgcaccggtttcatagctataccggttatgattggtggtattgagcaatcagtaatcattcagtgggggtggaatgccgcaaaagcatctgcctctgggggggatggaaatacagttgtattcccggttgcgtttaataatgcctgtgttgccgttgttgcaaattatgacaatgtcagcgcacctatcaatgcagtggcaacggggggatatacaaccacttcgtttttattacggtgcgcagctcaaacgggtagttattactataactggattgctattgggtattaagatgaaaatatactgttgcttaaataccgttggtttttttatggatggctgtggcgtcattccgccagattctaaagaaataacggcagaacactggcagtcattattaaaatctcaagctgaaggaggcgtgatcgatttttctgtttttcctccttctattaaagaggttatccgtactcatgatgatgaagtcgcagatgcgaactttcaaaagcagatgcttatctctgatgcaactgattttatcaatagcagacagtggcagggtaaggctgcattgggaagacttaaagaagatgagctgaaacaatataatttgtggctggattatctggaagcactggaactggttgatacatccagtgcgccagatattgaatggcctacgcctccggcagttcaggccagatgacatccggcgcggtgctggtatctgttgccgtcaccgcgtcaatgtaatccagcacagcgttaagtctggttgtttctgcctgcgtcagtttacgtccggcctgcaatttcagttgaatcagactaatggaagccattgcagcatcaatcagtgactggcgctgtgcttctgccgcgtctactgcggcgctatgctgtgcttcagtatcggtcacccatttctcaccatcccatttatcgtatggagataaaggggcgatagtggttgtattttcagggtaatcacccggagctttgatttcttttgattctccagttttggtgctatagaccgtttcaccgcgatggtctggcacatattcccatgagttaaaatctgcagaacggcagattgcataaccagccttatgtgtaccaggggcatctaaacaggaacatgccggaatgccgacaccaacggcaagatattcatttgaagtggaaatatattcccgtgtttcaccatcgtagttataaacggtaacatcccctgcctttgttgcaataaggtcactatttaatattgctttatgcatcaggctgccctcacgatatagttaaatgcaatattacgcggacgcgtttctgaggctgcggcacctaaaccatccactgattgtttatatgttttaaaggttccataatccggggctggtaatccggcatcgtttgtgtttcctcttttgataatgtcagtgccactatttacccatatttcatcaaaatagaaattaatcgttgcatcagtcacaatcgtggatcttgacggtaatccatgagcatgatcctccgttgcatacccctgaatacttaaaatagagcgacctgtatcaatcccccgcccgtcatcccagccacgaataaactcaccacgtaaatcaggcaatttatttgtcggataagcctttgccagttccgggtattcttcagcagaaaaagcggcaccattgcatttcagccagcctgttggcggagtggctgaaggccacggaaccgggacaccaacaggtaatgcagagccttctcccaaaccaacgtttatgaaaatgaagaaataacaagcaaatggcatcattcctgcttttaccagggggatttaacatgcttattggctatgtacgcgtatcaacaaatgaccagaacacagatctacaacgtaatgcgctgaactgtgcaggatgcgagctgatttttgaagacaagataagcggcacaaagtccgaaaggccgggactgaaaaaactgctcaggacattatcggcaggtgacactctggttgtctggaagctggatcggctggggcgtagtatgcggcatcttgtcgtgctggtggaggagttgcgcgaacgaggcatcaactttcgtagtctgacggattcaattgataccagcacaccaatgggacgctttttctttcatgtgatgggtgccctggctgaaatggagcgtgaactgattgttgaacgaacaaaagctggactggaaactgctcgtgcacagggacgaattggtggacgtcgtcccaaacttacaccagaacaatgggcacaagctggacgattaattgcagcaggaactcctcgccagaaggtggcgattatctatgatgttggtgtgtcaactttgtataagaggtttcctgcaggggataaataaagttaaagacactttgtgtacaaaagaaagtaaaacaacagcaacttgttgcaattttatcaataaaagtagtattgtcgtgaaaaattgattaaagattaatattatgcatgtttttgataataatggaattgaactgaaagctgagtgttcgataggtgaagaggatggtgtttatggtctaatccttgagtcgtgggggccgggtgacagaaacaaagattacaatatcgctcttgattatatcattgaacggttggttgattctggtgtatcccaagtcgtagtatatctggcgtcatcatcagtcagaaaacatatgcattctttggatgaaagaaaaatccatcctggtgaatattttactttgattggtaatagcccccgcgatatacgcttgaagatgtgtggttatcaggcttattttagtcgtacggggagaaaggaaattccttccggcaatagaacgaaacgaatattgataaatgttccaggtatttatagtgacagtttttgggcgtctataatacgtggagaactatcagagctttcacagcctacagatgatgaatcgcttctgaatatgagggttagtaaattaattaagaaaacgttgagtcaacccgagggctccaggaaaccagttgaggtagaaagactacaaaaagtttatgtccgagacccgatggtaaaagcttggattttacagcaaagtaaaggtatatgtgaaaactgtggtaaaaatgctccgttttatttaaatgatggaaacccatatttggaagtacatcatgtaattcccctgtcttcaggtggtgctgatacaacagataactgtgttgccctttgtccgaattgccatagagaattgcactatagtaaaaatgcaaaagaactaatcgagatgctttacgttaatataaaccgattacagaaataaaattatttattaaagtcacatttaagacgtaataccctacagggtaaaaattttctctgatcttaacttctgcaaatgttaactgctatttttatgctaaaaatggttatcaaaactcaaaaacacatgtttataatcaatgagttatagaaatgctaagggctaatgagttatatgcaaattagtaaaattatgttgctatgtcagatagttacgatttagtcatctaactaatgctgcgccatatgggttggactgaagcggctgacctgattgttaaaggtatggaaggcgcaatcaatgccaagaccgtaacttatgacttcgaacgtctgatggaaggcgctaagctgctgaaatgttcagagtttggtgaagcgatcatcgaaaacatgtaatctctccatgtgttaaatattgaaacgggcgtataacacgcccgttgttttatttatgtggatattattaatagcatatcgagcatatttatatgaagcccattacttgagcccatatgggcatatttttataatgcaactattatgtaaacatttatttgttattttgctttctcctggaggacactcttgactgcttttgagtaaactccataaatccttgttgaatggtgcgatgtgataaatagtaataggatattctttatccttaaggataataccagacttaaccggtgtaaatatactgccaggagggagaaatatagtagattgataccagatgatcattttcatattaccccatatggctgaaaaagatataccacatgtaggttgaattaccgtgtcaattactatccacttcatttgttatgtcttatcccacggtatttaatatggttcattaggatgtttatttcttgattttgcatatgagtatattacccccccctcaaaaaaataaattaattaaaatgatggcttatataaaataaaatttaaagcaaggaatctcaatggatgttaaacaaaatgagattttgtgaaagcaataaattattgacttcgttttagatttgtttagctataatgttatacattcaaatgactgaacatcctgtaattaaaacatagcctttatgctactttgtgccaatttgctaaacattatggttgcctttttatataacgataataatgaatataagcatgacatgagaataaggtttcaatttttgagttatataggaatgatttaacctgttcctggctaaaatacatataaccggatgatgactaaaccaaaatacatgtgcgttaagtattgaaacggacgtgtggcacggccgttgtttttataaatatgttaaccgttataaaataacgtatcaaaagtcaagtgatcacatttcaaatatcaagttgatagtattagtctggtgattatttatgggtgacaataaaaagacagtattaatcatccatagagatagtctctgcacttttatttccattatgctaatgccttactgaattatgaagcatttcttaagtatccaactttagctagattaatggtttattattttctacatcttcaatatataaaagcgtattatcaatggcgtagtaactgcgtttgttatgattaacatcagtaacccaccggaaaacgcccgcgcctgccagtgttgaacagtattcccgaaatgtagattttccgcaaatatgaagcaatgcggcctcttttattttagcagggttcttggtcgtactaacttttaacaggttcctggttcctcttaataacaaaaccgtatcatcgtgagtaataattctgatgttatccgtagccagataataaatgtaatgtgcaatacggtgatgttttaattctgaataaaaccaggagaagttttgctcttttctcacttgctcaaacatcttttgaaaaacaacgacctgatccatcaggataataacctcttgttagttgtgagactgcgtagtgtgcacgatcggttttaccacttcaatctggtctgtcctttggctgtgatatgtacagagtgtgatagagggaatatctgaattctcccggtgagcattttgcaacggaccagctccggtacaaacgctgttgtgggttcagattataacattctgtctaaggggcgggataaaggtgaaattagggggcatgaaagatgactttataaccttgctcaccccagtgttgtaaaagttcgttttgccttctcgttggtgccatgcctgtccagacaatcaatgtttgcgtcgggaacagttccgggcgcggcgattcaatgggatcagcaagaacagaaatgtgccatcctgacaatgataaacgccatgcttccagccacaatcgtgctctctcttcaacattccacgccatcagaatggcttctttaccgggcttacggcgcatttcgaaaagcgaggttgctgcgtattcaattaatgcgccgtcaaacatactgctcataatgcgggaggtgttgtgatcaagcacgagacgctggcgaacaggaaggtaaacatgattaatcaattgatctactgggtactctcgacccagtgaaataattctcgcgcgtagtttggcaggattagccatgcgaagaattgacatcatctcttcttgcaggcggctccagtcatcttccgtatcctggctggtggtttccagtaatgctttaactttgcctacagggacgccattacttatccaacgcttgatctcttcgatgcgttgtatgtcttcttcatcaaagagtcggtgtccgccttcactgcgctgtggttttaacaaaccgtagcggcgttgccaggcccggagagtgacaggattaatcccgcaacgttcagcaacatcaccaatgctgtaataagccacaattcctccttgcggtcacaaatctccgtcgcctgtacacgacccaataatactttgtacaatatacgctaaaattgtacaaagtataaataagatttcagctaaattggatgaaacattatttttaatgtggattaaatttaaacgtaacgtattcattttcacgatgatttactgaaatcatgtgaaagaatgtgctgaaaattattttttctctggccacgctatggaagggataccattcaatttagctttagcaaacagatctccctgaaacatctcaattcctgcggattcaagccacatccactcttctggtgttgccacgcccatagcactgacttgaatttcaagtgatgtacagcattttatgatcgcctgaataattgcctgccgtggcccacttttatgaacattggtaatcaattcctgactgattttaattctgtcaggctggaagcgtgacaggagtaacaaaccagcaaaacctgcgccaaaatgatcaattgctacactgataccagcagcctttagcgatttaatcgcttcggcaaactcatcaaaccgagatatgacttcactttcagtaaattcaacgatgatttgttcaggcaccagagcattggcctttatttcattaagtaaaaaagagactgcgtcaggttcgttaaccagggtcataggtaatagattgattgaaatcattttatcaccgagctcaagtgcgtgtgccatcgtgaatgcaagcgccttacttttgagatccgctgtgtagatttccccgtctttacgctgcccaaccgctatggctgatgggctatcttcatttttttgcacaatggcttcaaaagcgattatccgccgcgataagggatcgacaataggatgaaaggcaaagtggtcgtttatagttggtgaaagggcacaggaatcaagttctttatcagatccgtcagcgataaaaagccaggagtcttcggcagggatctcgaaataggttgattgttcggttgcaaggacaaaagtacgaaaaaattgtagcgctctgtcatcataagttagctgaaattttgatgtgcctttgtcgaatacggcctgtaaaacgtcatctcgctcgtgcaggcgcaaatcaaataattccattcccgctttgccaaaacggcgagcaggcgcgtaatcgcacagcagctcaacaatattatagtgccgtggatcctggcatatagcccgatatatcattttaacctgttcttccggaccttccagaagctggaaaaaatgagaaccattaaacagtaagatccctgttacgtcagactgcatgttcctgcgatttgctatcgaaaccatttcttcgatttttttgacaggttcgtcgtcacgtatatggctacgataaataagggtggtaagcattaacaatccagggtaatgggtgaggcgagagtaagacggtaacagacatatcttcttgtgtctttcttttaataccaaaacataaccgtttctttacattgataaaaaatggaaaaagttgaacactagttggcgaaaaatcttgtatagattgtcagttaaatgatgcaatatgttttatcataacacattgttttatatgcattagcactaattgcaaaaaattaatttatcattctgtacacatatttcgtacaagtttgctattgttacttcacttaacattgattaacatttttaacagaggcgtagcatgcatcaaaattcagtgactttagattctgcgggagcaatcactcgttactttgcaaaagctaacttgcatactcagcaggaaactctcggggaaattgtgactgagattttgaaagatggacgtaatctgagtcgaaagtcgctttgtgccaaacttctttgccgactggaacacgcgactggggaagaggaacagaaacattataatgcactaattgggttgctttttgaataatgcaacagcctgattatttaacaggttagctatgaagtcgttatgaagacatctgataatgaacgtataaaatatgaaattactggccaggcggtgctccagatactgcgcatgaagataaatttttcattgcagactcttattaagcaattactcgtaatgaaatcggctgaggaagatgctttccgacgcgatttaattgacagcataattcgtgattttagcaatagtgattcaggagggccaaaccgaagaacagcgacagctgacaataaaagtatgttcaatggtaagaaaataaacagaatacattaaaatttcataagtaagatgagaggttaccatgcttgaagatactacaattcataatgcaataactgataaagcgttagcaagttactttcgcagttcgggtaatttgttagaagaagaatcagcagtgttagggcaggctgtcaccaatttaatgctttcaggcgataatgttaataataaaaatattatcttaagtctgatacactccttggaaacaacaagtgatattctcaaagctgatgtgattagaaaaacactggaaatcgtgttgcgatacacagctgatgatatgtaacttctaattattaagtataagtttatagaaaactcattcatcttatttttgtctgtcgctttagactatacacagcataattttattgggttaatatttctacgaggctgacatgaataattcaatcccagagagatttatttttcaatgtgctttgtttaaaaatctcgagagggaggtgttcatgacgcatgggtatgttgatagtcatattattgatcaggctttacgcttgcgtttaaaagatgaaaccagtgtgattctttctgatctctatctgcaaatattgcagtacattgaaatgcataagactacactaacggatatcattattaatgacagggaatccgtgctctcttagaacttgagtaaggttttagaataaacatcagctgtatcaccatgctgatgcaaagtgagcatttcaggcgttatgctttcttattatgtccgcaatatcaggtgtcaagaatggagagttctcgctctccattcttgacgcctgatatcccgcctaacttattttgtactgcctacattatgctcaataattaatgggttagatcaagatggagaaaattttatcttcggcgtggatatttcttatgctctctaccatgctctctgtagatgccagcgcgagcgaatgaatggcattttcatgtattaaaccctttggccgggacaagcaaatgcgcaatacactcatacccatcctcgttgcgatatgcttgtttattaccggtgtcgctattttgaacatccagctctggtattccgcaaaagcagagtacctggcgggagcgagatatgccgccaacaatatcaatcatatacttgaagaagcgtcacaagcgactcaaacagcggttaacattgccgggaaggaatgcaacctcgaggagcaatatcagcttggcactgaagcagctctgaaacctcacctgcgcacaatcatcattctcaaacagggaatagtctggtgtacatccctgcctgggaatcgggtcctgttgtctcgtattcctgttttcccggacagtaatttactgttggctccagcaatcgacaccgttaatagattacctatcctgctctatcagaaccaatttgcagatacgcgcattttggttacgataagcgatcagcatattcgtggggcacttaatgtacccttgaaaggggtaaggtatgtattacgcgtggcggatgacattattggaccaacgggtgatgtgatgacgcttaatggacattatccctataccgagaaggttcactccacaaaatatcatttcactattatctttaacccgccgccactctttagcttctacagacttatcgataaaggctttgggattttaatatttattctgttaatcgcctgcgccgctgccttcctgcttgatagatatttcaataaaagcgcaacgcctgaagagatcctgcgacgggcaataaataatggggagatcgtccctttttaccaacctgtggtaaatggtcgggaagggacattgcggggagttgaggtgttagcccgctggaaacaacctcacggtggatatatatcacccgcggcatttattccacttgctgaaaaatccggattaatcgttccgcttacgcaaagcctgatgaatcaggttgccagacagatgaacgctatcgcgagtaaattgccggaaggttttcatattggaattaattttagcgcttcgcatattatttcgccgacgtttgtcgacgagtgtttaaatttccgtgacagttttacccgccgcgatttaaaccttgttctggaagtcaccgagcgtgagccattgaatgttgatgaaagtctggttcagcggttgaacatactgcatgaaaatggttttgtcatcgcactggatgatttcggtactggctactcagggctttcttatcttcatgacctgcatattgattatatcaaaattgatcacagtttcgttggccgcgtaaacgcagacccagaatcaacccgaattctggattgtgtattggatctggcgcgtaaactttcgatcagtatcgtcgctgaaggtgtcgaaacgaaagaacaacttgactatctgaaccaaaattatatcacatttcagcagggttattatttctataaacctgttacatacatcgacctggtcaaaattatcctttctaaaccgaaggtgaaggttgtggttgagtgaaaattgatcagtaaggccatagtgcggtgtaattatagacagctaattagctcgttgcctcttgttactattgttcattattttgtttgctataattgtttgaaagttttgacaggattgccattagtagcatgaacaatagtaataatctggattatttcactctctatatcatattttccattgcatttatgctgatcaccctcctggtcatccttattgcaaaacccagtaccgggctgggagaagtgcttgtgacgataaatttgcttaatgcccttgtttggctggcgatcaatctggttaatcgattaagagaaagactcgtcaaccacagggatcagcaataatctttcagtttctcactgtcagtatgcggctgaatgggttgctggcagtgaacgcctggatcattgaaggaaaggcattattgcgcaaatagttgtcaaccctggtgttatcacggttgtttttatatatcaccgaaataatcctcatcgcaactattaacaattttgatgtcgaagagttatttgttaaacaaaatcgtcacctcaaagtgatcaatgtcatgaaaataaggtgaaaaatgataatgccgacttatttatcatttatatattgtcgctgtttatctatttaaattttttgtgcttttgtttttgtctttaccctccgttttggtaatctgagctcataggttatttgaccaggaatgtttgttaatccaatgaatggatggttaatctatgaaactgaaaaaactccccgggtttagtttgggacttattgctctggcggtgggtaatgcatatgcaacacaattgttggatgattatagtataatttcctatatgactgatgaagaatcgccgattgaaatcaaagataataatccgataagtaatggagagtatctaaccactgaagacgaaagccatgctgtgaaagtggatgacggtgtaactggatatataaataatgccagtgtgatgactagtggtgatggatcttatggtatttctgttgatagtcaaaacaaagtattatatataagcgatagcgatattaagacctctggaagcgtatctgacaaagaaaatggagggataacagccagcgcagtagtcagtgaatttggtggcaccatctttatgaatggtgataattcagtcgagtcgggtggggcatattcagcgggacttttaagccaggttaatgattctgaaaagatggtaaataacacccgtcttgaaaccacagataaaacgaacattgttacctctggggaaaatgcagtaggtgttcttgcatgttcaagtcctggagagtctcgaacatgtgtcgatgctgtagatgatgaagttagtgattctaacagttacgaagttattagccgtgctgatttaaaaatgaatggtggttccataacaactaatggcattaatagctatggtgcttatgctaatgggaaaaaagcatatattaatttagattatgtggcacttgaaactgtggctgatggaagttatgcagttgctattcgacaaggtaacattgatataaaaaatagttctattacaacaacaggcactaaagcccccattgcaaaaatatacaatggtggagagttatttttttccaatgtcaccgcggtatcaaaacaagataaaggaatatcaattgatgcatcaaatatcgattctcaagccaaaatagcactattaagtgttgaactttcaagtgctttggatagtattgatgttaacaaaactacaacggatgtaagtatccttaatcgaagtattatcacacctggtaataatgttctggttaataatactggaggtgacttaaacataatttcgtccgactctattctaaatggagcgactaaactcgtcagcggcacaaccacgctgaagctttcagaaaatacaatctggaatatgaaagatgactccgttgttacccatctgactaattcagacagtattatcaatctttcgtatgatgatggtcaaacatttacccaaggaaaaacattaaccgtaaaaggtaattatgtcggtaataatggtcagcttaatatccgcaccgtattaggtgatgataaatcggctacggacagacttattgttgagggtaatacttcgggttcaactaccgtctatgtgaaaaatgctggaggaagcggcgcggccacgctaaacgggatcgaactcataactgtgaatggcgatgaatctccagcagatgccttcagataaggtgatgcaaggattgcagctggagctttcgaatatcaactaaaacaacaaggcaaaaactggtatttgacaagttatcagtcagtgaatgaggaggataacagctcagagggaaattcagaatcaacagaaacgcctacccccgtcctgcgccccgaagctggaagttacgtcgctaacctggcagctgctaacactctttttgttatgcgtctgaacgaccgtgcgggtgaaacgcgctacatcgatcctgtaactgaacaggagcgttcaagccgactttggctacgtcaaattggcgggcataatgcctggcgtgacagcaacggacagttgagaacgacctcgcatcgctacgtctcgcagttagggggcgatctgttaaccggtggttttaccgatagtgacagttggcgtttgggagtgatggctggttatgcccgcgactacaacttaactcattccagcgtgtcggattatcgttcgaaagggagtgtcagaggctatagcgcagggctgtatgccacctggtttgccgatgacatcagtaaaaaaggcgcatacattgactcctgggcgcaatatagctggtttaaaaactcggtgaaaggggatgaattagcctatgaatcctatagcgcgaaaggtgcaaccgtctcgctggaagcgggttacggttttgccctgaataaatcctttggtctggaagcggcgaaatatacgtggatcttccagccacaggcacaggctatctggatgggcgtcgatcataatgcgcacacggaagccaatggctcacgtattgagaatgacgcaaataacaacatccagacccgactcggcttccgcacctttattcgtactcaggagaaaaacagcggtccgcacggtgacgactttgaaccttttgttgaaatgaactggatccataacagtaaagattttgctgtctcaatgaacggtgtgaaagtcgaacaagatggggcgagtaatttgggggaaattaaacttggcgtaaatggcaacctgaatccagcggccagcgtctggggaatgtgggcgtgcagctgggtgataatggctacaatgacaccgcagtgatggtgggcctgaaatataagttctgatcccgccgttagctaaaaaaccgcgtcgtattcatcgacgcggtacatatgaaatattattttttgccgatagcacgcatggtgtcatcaattgccgtgatcaacagcatttgcgggtctttagcgcaaacctgattcagtttttctaccactttggcgctcagttccggagattgctcaatttttaaatcacggctggcaacgctggcattacccattaccgcaacaatttctgcaacctgtgcgctgtcagtttttgccatttcgttggcttctgcgcaagtaatataggtttctgacggcaaaccgtttttaatattgtagtcctgcgcccaggtcattggtgcgaaaacaaacaggcccgccagtaaagcaaattttttcatcatcattccttatttcattttacccagaattgcaccacccgtaccgccaatcacggcacctttaatcgccccttcgaggccattgccggtcagaacgccagtgacagcaccaacggcggcacccacttttgcacctttacgcgcatttttaccgtcgcggcctttttctgttactgcaccaacaccagcgccaacagctgcacctttcagtacgccattaacaccattgccagtaagtaaaccaacgcctgcgcctagcaatgcacctttcgtggtgcggttcatatccgccatcgctggcgtggagcagaacaatgctgagataagcccgaaggcaagtatttttttcttcaacttagatgtccggtattaagtaagttgcacacacaataatttcgtcttcaattaagatctgcttaactaaagaacgctcgctattattcagataattcaaaatgagcgtggctgtgatgataggaattatgttttttacgtgaatgagaataatcttaaatgaggaataactcattgattgacaatatttttattcaagaagtgtcattgactgttaacgcaatgttgtaaaggtaagataatctgatttatcaatattattgtgtgatttttatgtgagcagaagatattcatcagcaacgattacattagtcattttattttgccgacggcctcattgtcgaaagataagcgtacgacagtattatcagaaaagagtgattttttatccaactacacttcagcgcactgcgtgtaaaaaatgcctctttcttatgcgggatatcatcatttcatcatgatgtctttggtgagcggtgaacacaatacacctgcgctgtctcttcaggatgaatcccctggtctggtgcctgcgggctgatgttgcagcagagcttaggtcacttagacgctactatcatttatccaatggcatggaatcgaaatcagtcgatacccgcagtatatatcgtgaactgggtgcaacgctgagttacaacatgcgcctggggaacggtatggaaatgaaccctggctgaaggcggctgtgcgcaaagaatttgtcgatgataaccgggtgaaggtgaataatgacggtaatttcgtcaatgatttgtcgggcagacgtggaatataccaggcagctattaaagcctcattcagcagtacgtttagcggacatctcggggtggggtatagccatggtgccggtgtggaatccccgtggaacgcggtggctggtgtgaactggtcgttctgaccatcaacgattaaactgcgcttcggcgcagttttcgtttacaggatgttgaaagggaaaattctggggcaaaaaaagcccgccagttacggcgggaaacctcatcctatgggagaacaatgaataatgaaattgcggggttatcatctcccagtatatccatactaacaataaggttatttactcaaccaggcataaacattttgttttgtgcgtgggaacagccttaaggtgtaaagggggaggtggaaatagcaatgaggagtatcagcaagaatactcgccgctttaccacaacgtggatgagagggatgaaaaactcaaggcagagataactctgccttgaagataaatgcgcttttacagcgggcttatttcagctcttctgcttccggtaaggtcacgttcagctcaagaatagaaatatcgccatctttttgctcaagctgtacggttaccatctcaggatcaatttgtacgtatttacaaatgacctcaagaatatctttacgcaactgcggcagataatgcggttctgcatcgctgcgacggcgttcagcaacaataatctgcagccgttcttttgcaatgttggctgtgtttttcttccgcgagagaaagaaatcgagtaatgccataacttatcctccgaacaagcgtttgaggaagcctttcttctcttcttcaatgaagcggaaaggacgttcttctcccaacagacgttctacggtatctgcgtaggctttacccgcatcggcgttaatgtcgagaatgaccggttcaccctggttagaggcgcgcaatactgattgatcctctgggatcacgccgacgagtttgatgcgcaggatctccagcacatcttccatgctcagcatgtcacctctgcttacgcggcctgggttatagcgcgttaacagcaggtgctctttaataggctcttcgccattttctgcgcggcgtgatttcgacgccagaatgcctaaaatacggtcagagtcgcgtactgaggagacttccgggttggtggtaataatggcttcgtctgcaaaatagagtgccattaacgcaccggtttcaatccctgccggggagtcacaaacgataaattcaaaatccatcgctttcagatcatcaagaactttggcgaccccttcacgggtgagggcatctttatcgcgtgtttgcgatgccggcagaatatagagattttcagtacgcttatctttaattaacgcctgatttagcgttgcatcgccctgaatgacgttgacgaaatcgtaaacgacccggcgttcacaacccataatcaggtcgagattacgcaggccgatatcaaaatctatcacgacagttttctttcccttctgggccaaaccagtggcgatggccgcgctggaggttgtcttaccaacaccccctttgcccgaagtaacaacaataatgcgtgccatagaaattccttgttaaaaagggatcaatttaacggttgaacggtcaaagcgttttcgactaactgcagtcgcgccgctttgccataaaattctgctgggatttgatcactcagccagtattcacctgcgatggacaccagttccgccatcaggttcgtacaaaatatttgcgtttcccggtcaccacttgcccctgccagcgcacgaccgcgcatcatgccatagacatgaatgttcccatcggcaatcaattcggccccagcgctaacgtggcttgtaacaatcagatcacattgtggagcataaatacgctgaccggaacgcaccggggtatctattaaacgcgtttttgtgaccggcgttgtattttgcgctggagcctgcggtgtgggagctggacgtggcgctttttcctttccttccgtcaggataggcagccccatcttttcaatttcggctttaagttgcgcatctttgcagccacttacgccaataacccgcaaaccggttgccgaaaccgccttatgcatcgctgaccagtttaccgggtcttccagtgcactgacgttgagtacaacgggggcatgttttaaaaatgcgggggcctgagcgattttgtcttccagcgcctgatggataaccttaggttctgcctcatgcagatgaaccacagataaagtgaagctactgcctttaagctcgattggcgtgtttgacatcctggccttactcaattagctattaatcatcgccagcgcgcgatgatgttccgaagactataaggcatgttatagtctggattatattgaggcaagtcaccctcccatttattcagagtaaaagtctattctgtgataaatggcgctgattcatagcttaaaaaatacccttgtcaatcaacccattgccgtcgtacttttgattgttcttatttacgcttcctttttccgcaccctaatcgtgacagcatctccagacctgtttaaatatccagtattgaggcaagtgtattttttcaccacgccaggctttcttaactttccattttttgcggcatcattaaagaacagatacccgttatcttaatatccgccacagaattgctctatcatagaaaccgcagaagacgtctgatacttctgtcaggtcatcgtaactcgtccaggtcagcggttttgattacggattgatgatgaaatgagcataagtgttgtacggttggattatcaggatgtgctatgaatatgatgcgtattttttatatcggattgtcaggtgtggggatgatgttctcatcaatggcgtctggaaatgacgctggcggacttcaatctccggcgtgcggcgttgtttgcgacccgtatatttgtgtgaactcagatggcatttccccagagttaacaaggaaatatctcggcgaaaaagccgctgaaaacttacaatcattacaaggctacgatcccagcgaatttacattcgctaacggtgtattttgcgatgttaaagaaaaattatgtcgtgatgatcgttattttggtgtggatggtaagcggagtggaaaaatcaatcaaaccaccacaaagatgttatttatgtgtcgtgagtgatgtcttgtttacattatgttctattcgtcattaacctcttgagcgacagagaggagtggggcattaacgtttatgacggggagagtccccgtcggttgacatttacttaatttgaatatcgacgttatattttttagttttgtttttacgggcgtcgtttcgggtttgcaacactcgcagctcatatttgccagaagcagggagtgagtattgtccgtgactatcgagttctggggaatatctggataaatcaactgaatcatcgattcctggcccgaagaggtaagtatcagcgccttcattagagatactcacatgcactttctgaccttttttggcatagaaggtatatgtatcgtaatcgtatccctttatttcgccggagtactgagcgctgctatggccttttctgaactcaacattgacattcttacccgcagcaaagctcgtggaggttagcagtgcaagcagcaatacagccttcctgatgctcttgattttcattggtagtctcctgttcagaatgagtacgatgaactgttataatataacaatccctaacgggagaattccagtggctttcctgcgttcggtaaaatcacgttgcggcatttttgccggggggattacttataaagggggcatggactcaacaaaccgtagaaatctacagctggctggcttgtggcgcgggtttcattgatgttagcttatgccaaaacctggcatcttaaagagtaaaagtatgttttgtgtgatttatcgaagcagcaagcgtgaccagacctatttatatgtcgaaaaaaaagacgatttttcgcgtgttcctgaggaactgatgaaaggttttggtcagcctcagttagcgatgattctgccgctggatgggcggaagaaactggtcaatgccgatattgaaaaggttaaacaggcattaaccgagcaaggttactatttgcagttaccgccaccacccgaagatttgctgaagcaacatctttccgtcatggggcagaaaacagacgacactaacaaataaccgatatccggcggtggcattatctttgtcggcgcgggttttcatatccacgataaggtgaggggaacgttatgtatcaacatcacaactggcaaggtgcgctgctggattatccggtgagtaaagtagtctgtgttggcagtaactatgccaaacatattaaagagatgggcagcgcagtgcccgaagagccagtgctgtttattaaaccagaaacggcactgtgcgatctgcggcagccattggcgatcccatccgatttcggttcagttcatcatgaagtcgaactggcggtgttgattggcgcgacactgcgtcaggctacggaagagcatgtccgcaaagccattgccggttatggcgtggcgctcgatctgacattgcgtgatgttcagggaaaaatgaagaaagccgggcagccgtgggaaaaggctaaagcgtttgataactcttgtccgctttccgggtttattcccgcggcggaatttaccggcgacccgcaaaatacaacgctgagcctgagcgtaaacggcgaacaacgccagcaaggtacgactgcggacatgatccataaaatcgttccgctgatcgcttatatgagcaagttttttaccctcaaggccggtgacgttgtgttgacaggcacgcctgatggcgtcggcccgttgcaaagcggtgatgagctgacagtcactttcgatgggcattctttgacaactcgcgttttgtaatactttttgccgcctgaaagcggcggcaaaacttgcatcgctgtgccagactggttataaggtgcgttttaacgtaatggcggaacacctgatgagcgatgtacctttctggcaaagtaaaaccctggacgaaatgagcgatgcggaatgggagtcgttgtgtgatggttgcggtcagtgttgcctgcataaactgatggatgaagacaccgacgaaatctacttcactaacgtcgcctgtcgccagctcaatattaaaacctgtcaatgtcggaactacgaacgtcgtttcgagtttgaacccgactgcattaaattaacccgtgaaaatctgccaacattcgaatggctgccaatgacctgcgcttatcgtttgctggcggaaggtaaagatttacctgcgtggcatccgctacttactggttcgaaagcggcaatgcatggtgaacgtatctctgtgcgtcatatcgcagtgaaagaatcagaagtgattgactggcaggatcatatcttaaataaacctgactgggcgcagtgataaatttaatagatgctgatgggggctttcttaatatacgtctggatgctcgccatttcgtagccctgtttttgaaagcgctctgtcataatgagagttacccgataccttattatcaacaggtaactctcaatctttaaaaaacgtctgtgtttttaaatgtgataaaccttataccttgagtacatggagagaataatcgcttatcagacttcaggtacctcaaagagtgtctttttaccgtgtcttttctgatactcattacaggtgttaatcatttttttggccgcttcttttagcaaagaaagcattaaatcatcataatcaacgtagaatctggttgtttcagtttccgtttttatctcaccgatggcggctatttcggtggttaatttcaatttggcggcatcgatatctttattcgcttgtttaaccgtgttagacagggtggtaaagaaattctgcacagattttaacttgttcttcaattctggaatcagttttccttcaactacgcccgcagcaatagaataggaaatgattaatccaaatggaccggcgacgacaccggctgcggcaccggcatatgcttccttcctgattttatctacctgtgactggaaatagctgcttttttctgaaaaatcattggttaactggctatctaacgccagcagtttcccggaagcgttgttgaaactttgtgagcttaccagcagggatttttgcgcttcattcagcttcgtgatgccgtcatccagtaccttaatgagaatgtctttctgggcggatgctttcttctcattgtactcatcaaatagcaaaatatacgctgcgagcaattgcgtcgcaacaccacaccattcatacactgtttgggttgcttcaaaatacttatcctggctatccataagtaaggttttaatatcgccgactaaaacggaggctgcctgtgaatactcctgtttaaagcgacttaactcttttatggtttcatcaaaggtctgccaggggatgacctgatcgagatatttattataaagatctaatgctccatctgcggtttcgattgcgtttttaactacttctaccgttttatctgcaacgatttcagtcataatcattcgcctctttaaatatataaattgtaatgaaactcctgttttacaactattaataaattttacttcatctaattcatagttagccgggcgggatgcgtcaatgtctttatttctattaatatgataaatatcaaacaatgtttaatgtcattatggcgaatgcttctattctattttttagccgggtgatatttttcatttctgctggatgagcgtcgtcgccagaaggccacgtgagcacaagataagagaacgaaaaatcagcagcctatgcagcgacaaatattgatagcctgaatcagtattgatctgctggcaagaacagactactgtatataaaaacagtataacttcaggcagattattatgttgtttatcaagcctgcggatctccgcgaaattgtgacttttccgctatttagcgatcttgttcagtgtggctttccttcaccggcagcagattacgttgaacagcgcatcgatctgaatcaactgttgatccagcatcccagcgcgacttacttcgtcaaagcaagtggtgattctatgattgatggtggaattagtgacggtgatttactgattgtcgatagcgctattaccgccagccatggtgatattgtcatcgctgctgttgacggcgagtttacggtgaaaaaattgcaactacgcccgacggtacagcttattcccatgaacagcgcgtactcgcccattaccatcagtagtgaagatacgctggatgtctttggtgtggtgatccacgtcgttaaggcgatgcgctgatgtttgccctctgtgatgtaaacgcgttttatgccagctgtgagacggtgtttcgccctgatttatggggtaaaccggtggttgtgctatcgaataatgacggttgcgttatcgcccgaaacgctgaggcaaaggcgcttggcgttaaaatgggcgatccctggttcaaacaaaaagatctgtttcgtcgctgtggcgtggtttgctttagcagcaattatgagctttacgcagacatgagcaatcgggtgatgtcgacgctggaagagctatcgccccgcgtcgagatttacagtattgatgaggcattctgcgatctgacaggtgtgcgtaattgtcgcgatctgactgattttggcagagaaattcgcgcaacggtgctacaacgtacccatcttactgttggtgtggggatcgcccagaccaaaacgctggctaagcttgccaatcatgcggcaaaaaaatggcagcggcagacgggtggggtggtggatttatcaaatctggaacgccagcgtaaattaatgtctgctctccccgtggatgacgtctgggggattggacggcggatcagcaaaaaactggacgcgatggggatcaaaaccgttctcgatttggcggatacagatatccggtttatccgtaaacattttaatgtcgtgctcgaaagaacggtgcgtgaactgcgcggcgaaccctgtttgcaactggaagagtttgcaccgacgaagcaggaaattatctgttcccgctcgtttggtgaacgcatcacggattatccgtcgatgcggcaggccatttgtagttacgctgcccgggcggcggaaaaacttcgcagcgagcatcaatattgtcggtttatctccacgtttattaagacgtcaccatttgcgctcaatgaaccttattacggcaatagcgcgtcggtaaaactgctgacgcccactcaggacagcagggatatcattaacgctgctacgcgatctctggatgccatctggcaagcgggccatcgttaccaaaaagcgggcgtgatgctgggggatttcttcagtcagggagtcgcgcagctcaatttattcgatgacaacgcaccgcgccccgggagtgagcaattgatgacggtaatggatacactgaatgctaaagagggcagaggaacactctattttgccgggcaggggatccagcaacaatggcagatgaagcgagccatgctttcaccacgttatacaacgcgaagttctgatttactgagggtcaaataaatatagcggcaggaaaaaagcgctcccgcaggagcgccgaatggattagcgaccgaacagatcacgttttttcgctttaaacggctgggaaatcaccaccagcactgcgacaatcaggtaagcgataaaaataccgagcagccactgcggcatttccagacctaaaaaatcccactgacgctcggcgcaatcgccagaggcgacaaacacttgcggcacccacttatccagcggcagccattccgggaaacgaaccataaaatcacaggtggcaaacggcgaaggatagagctgaagcatggtgtgctcgtaagttaactgcacaccgcggaacgcactatacaaccagataaccatcgctacataacgcagcggagttttcggggcgatcgcgccaatcagcgcagcacccagaacgccgaataacgcgcagcgttcataaatacagagcacgcaaggtttcagtaacatcacatgctggaaccacagcgccgtcagttccagtgccagagcagtaaacgccatcaacagccacgcgccccggccttgtgaacattggttcaaaaatcgcaacataatcatttccctgcaatatgcatagagtgcgcagtttaaaccaattcattcgctgcgccaccaggaggcagcaaaaataggacgcaattggacaattatcgggcgaaaaggcaaaccgggcatttatatgcccggtaagttgttatcaaagcgttgctatccagcccatttgcataaaccattcggttacaggggcaagcgtaaactcgacgcagagcaagccgacgagtgtcaggacgagggtgtaaggcagggccatccacaccatgcggccataagagaggcgaatcaatggcgcgagtgcagaggtcagcaggaacaggaacgcagcctgaccgttcggcgtagcgacggagggcagattggtaccggtattaatggcgaccgccagcagctcgtattgcttcaacgtgatagcgccactttccattgccgctttcgcttcgttgatataaatcgtccccacgaagacgttatccgaaatggatgacagcagaccgttgaaaatatagaacagcgacagctgagcatgttccgatgcctgcaacacaaactgaataattggcgaaaacagttgttggtcgataatcaccgcgactaccgagaaaaacaccgtcaacagtgcggtgaatggcagagattcggtgaaggctttaccgatagcatgctcatcggtgacaccggtcaatgatgttgccagaataatgactgacaaaccaatcaagccaacttccgccagatgcaacgccagcgcagtcaccagccagacgccaataatcgcctggacaatcagacggattttatcctgacgggtacgctggtggcggctttgatcgtcaaactgttgcaacacttcgcggactttctccggcagcgtttcaccgtagccaaaccaacgcagcttctctaccagcaggcaggttaacaggccacaaatcagaaccggaacggtcaccggcgacatgcgcaggaagaaatcgccaaaatgccagccagccgctttagcgatgatcaggttctgtggttcgcccaccatggtcattacgccgcctaatgcggtgccgacaccggcatgcatcatcaggctacgcagaaagccacggaactgttccagaaccactttgtaatgcttgtcgatatgactatcgtcttgcaggtcggtgtcttcggtacgggaagaggctacgcggtgataaataccataaaaaccgactgcaacgctgatcaccaccgccacgacggttaaggcatcgaggaacgcggagaggaacgcagccgccacgcaaaaagagagcgacagcagcattttggagcgaatgcttaacagcaaacgggtaaatatgaacagcaacagctgtttcataaaatagatacccgccaccataaacatcagtaacagcaagacttcaagatttgccgccacctcttcacggacgtgttccgcgctggtcatgccgatgaataccgcttcgatagccaacagaccaccggggagcagcgggtagcatttcagggccatcgccagagtgaaaataaattccgctaccagcaaccagcccgcgacgaaagggctgatgaggaaaattaacgggtttacgattaagaaaatgatgagggcgagtttgtaccagtcgggggactggcccaaaaaattgcgccatagcgcgcggccccaggagatctccatgatggtttcccttaccttacaaataatcaatgatgtttttatgtttaaacgcaaagcttaacggtcaggcaggagtgaggcaagtcttgatagtcaaggggaaagagatgcggaaaatgaagccttgatccctttttcttctttttgtctgctatcagcgtagttagccctctggtatgatgagtccaactttgttttgctgtgttatggaaatctcactatggtcattaaggcgcaaagcccggcgggtttcgcggaagagtacattattgaaagtatctggaataaccgcttccctcccgggactattttgcccgcagaacgtgaactttcagaattaattggcgtaacgcgtactacgttacgtgaagtgttacagcgtctggcacgagatggctggttgaccattcaacatggcaagccgacgaaggtgaataatttctgggaaacttccggtttaaatatccttgaaacactggcgcgactggatcacgaaagtgtgccgcagcttattgataatttgctgtcggtgcgtaccaatatttccactatttttattcgcaccgcgtttcgtcagcatcccgataaagcgcaggaagtgctggctaccgctaatgaagtggccgatcacgccgatgcctttgccgagctggattacaacatattccgcggcctggcgtttgcttccggcaacccgatttacggtctgattcttaacgggatgaaagggctgtatacgcgtattggtcgtcactatttcgccaatccggaagcgcgcagtctggcgctgggcttctaccacaaactgtcggcgttgtgcagtgaaggcgcgcacgatcaggtgtacgaaacagtgcgtcgctatgggcatgagagtggcgagatttggcaccggatgcagaaaaatctgccgggtgatttagccattcaggggcgataatcccttccgtttaaagagcaaacccctcaaacgaggggttttttgttgtttttacagatttcccattcttggcgggcaacgttccagcaactcgatgctgccgtcttcgttttgctgttcgagcatcacatcaaatccccacaggcgatgcacatgcttcaggacttctttgcgcccccgatccagcggtgcgcgattatgtggaatataacgcagcgtcagcgaacggtcgccgcgcaaatccacgttccagatctgaatattcggctccagattacttaagttatattgcgacgataaccggttacggatctcccgataaccttcttcattatgaatagcggaaatctccagataattatgccgatcgtcatccagcacggtgaagaagcggaaatcacgcatcactttcggtgacaggaactggctgataaaactctcatctttgaaatcacgcatcgcgaaatgcagcgtttccagccagtcggaaccggcgatatccgggaaccagtatttgtcttcttccgttggcgactgacaaatccgtttaatatcctggaacatggcgaacccgagggcatacgggttgatgccgctgtaccacgggctgttataggggggctggaagaccacattggtgtggctgtgcaaaaactccagcataaaacgttccgttactttcccttcatcatacagatggttaaggatggtgtagtgccagaaggtcgcccagccttcgttcatcacctgagtctgtttttgcggataaaaatactggctcaccttacgcacaatacgcaggatttcacgctgccatgattccagcagtggcgcatttttctccataaaatagagcaggttttcttgtggttcggacggatagcggcgcgcttcagcaaccgttttctcttcctcgcgcttcggcagggtacgccagagcatattgacctgactttgcagatactcttcgcgacttttctgccgggctttctcttcttgcagcgagattttttgcgggcgtttgtaccggtccacgccgtagttcatcagcgcgtggcacgagtccagaagccgttctacttcatcaacgccataacgctcttcgcactcggtaatatatttacgggcaaaaatcagataatcgacaatcgaactggcgtcggtccagctacggaataagtaattgtttttgaagaaagagttatgcccatagcaggcatgagccatcaccagcgcttgcatggtaatggtgttctcttccatcaggtaagcgatacacgggttagagttaatgacgatttcataggccagtccttgctgaccgtgcttatacagccgttcagtctcgataaactttttaccgaatgaccagtgcggatagttaattggcatgccgacgctggagtaggcatccatcatctgttctgaggttatcacttcaatctggtgcgggtaggtatccagccggtagagtttcgccacccggtctatctctgccagataaacatccagcaggtcgaacgtccagtcgggtccatcgctcaaacgtgtggtgtccttattcatagaatcgatcgtcgccatacgcgcacctcattgttgtcggcgctctctgtgtggagcacctcatttcaagcatagaacacctgttaaaaaccgcgtcgccggagaatttttttctttgcgatttcttattatcagagtgccactaatccgcttctgaacggaattttatgctggataaaaagggcgttcagcaggagatactaaagacgccatattgccgcagagtcagggagatgtgagccagctcaccataaaaaagccgcatgttgaataatattttcaactgagttatcaagatgtgattagattattattcttttactgtatctaccgttatcggagtggctatgcgagttgtcatactgggaagtggtgtggtaggcgttgccagcgcctggtacttaaatcaggcaggacatgaggtcaccgtcattgatcgggagccgggggccgccctggaaaccagtgccgcgaatgccgggcaaatctcccccggatatgctgcaccgtgggcggcaccaggtgtgcctttaaaagcgattaaatggatgttccagcgccatgcgccgctggcggttcgtctcgacggtacgcagttccagttgaaatggatgtggcaaatgttacgtaactgcgacaccagccactacatggaaaacaaagggcggatggtgcgtctggcggaatacagccgtgattgcctgaaagcattgcgcgccgaaaccaatattcagtatgaagggcgtcagggtgggacgctgcaactgttccgtaccgaacaacagtatgaaaatgcgacccgcgatatcgccgtgctggaagatgccggcgtaccgtatcagctgctggaatccagccgcctggcggaagtggagcccgcgctggcagaagtggcgcacaaactgacgggcggcctgcagttacccaatgatgaaaccggagactgtcagctatttacccagaatctggcgcggatggcggagcaggcgggggttaaattccgctttaatacgcccgttgaccaactgctttgcgacggcgagcaaatctacggcgtgaagtgtggcgatgaagtgattaaggccgatgcgtatgtgatggcgtttggttcttactcgacggcgatgctcaaaggcattgttgatattccggtgtatccgctgaaaggctactcgctgaccattccaattgcgcaggaagatggtgcgccggtatccaccattcttgatgaaacctacaaaatcgccattacccgtttcgataaccgcattcgtgttggcggaatggcggagattgttggttttaataccgagctgttgcaaccgcgtcgtgaaacgctggagatggtggttcgcgatctctatccacgcggcggtcatgtcgagcaggcgactttctggactggtctgcgcccgatgacgccagacggcacgccggttgtcgggcgtacacgctttaaaaatctgtggctgaataccggtcacggcacgctcggctggacgatggcttgcggttccggtcagttgttaagcgatctgctctctggtcgcacgccagcgatcccatatgaggatctaagcgtagcgcgctacagccgtggatttacgccatcacgtccgggccatttacatggcgcacacagctaaggaaacgagatgacccgtccgatacaggccagcctcgatctgcaggcattaaaacagaatctgtccattgtccgccaggccgcgacgcacgcgcgcgtctggtcggtggtaaaagcgaacgcttacgggcatggtattgagcgtatctggagcgcgatcggggccaccgatggctttgcattgcttaacctggaagaggcaataacgttacgtgagcgcggctggaaaggaccgatcctgatgctggaaggatttttccatgctcaggatctggagatttatgaccagcaccgcctgaccacctgcgtacacagcaactggcagctcaaagcactgcaaaatgcgcggctaaaagcaccgttggatatttatcttaaagtgaacagtgggatgaatcggttgggcttccagcccgatcgcgtgcttaccgtctggcagcagttgcgggcaatggcgaatgttggcgaaatgaccctgatgtcgcattttgccgaagcggaacatcctgatggaatttccggcgcgatggcgcgtattgagcaggcggcggaggggctggagtgtcggcgttcgttgtccaattcggcggcgactctgtggcacccggaagcgcattttgactgggttcggcctggcattattttgtatggcgcttcgccgtccggtcagtggcgtgatatcgccaataccggattacgtccggtgatgacgctaagcagtgagattattggtgtccagacgctaaaagcgggcgagcgtgtgggctacggcggtcgctatactgcgcgcgatgaacagcgaatcggcattgtcgccgcagggtacgccgacggttatccgcgccacgcgcctaccggtacccctgttttagtggacggcgtgcgcaccatgacggtggggaccgtctcgatggatatgctagcggtcgatttaacgccttgcccgcaggcgggtattggtacgccggttgagctgtggggcaaggagatcaaaattgatgatgtcgccgccgctgccggaacggtgggctatgagttgatgtgcgcgctggcgctacgcgtcccggttgtgacggtgtaacttgttgtaagccggatcggaggcaacgtcttctgggtgcaaaaaaatcatccatccggctggtcagcaactgtagttgttaatgtgacagagccattgcccatgatagtgtccattaaaaggatggacactatttccccggaacctgaactcaccgcacaggcgttctacataaaacgcttacgcttcattgttgactcgaactcgacttcagataaatcacgctttacccttgatggagcctgtacatagatttgtgtaattgcctgattttgatatgttcaattcaacatcaaatgaaggttaaattatggacgacaaacaattgcaggctcaggctgcgttcagcaaagcatcgcaaccggcgatagatgcttcattaaatttaagattcagcttcctcttcagccacccgtacgccaatcttcaacacttcattatcttctttctcggccaccgtccagatcatcccggcaaactctacctggtcaccgacaaccggtgccgcgcctaacaactgctggacaatttcacccagcgtttgctgcttatcacgatattctcgcccgtcttccaggccatatatcagcgcaacatcagcatatttggcgctggcttcgagaatgaagtcaccaaagaagcgttgatccagcgcgaccggcggcgactggctgaacagtttaccgagcgccggaagatcgcgttcccgaccaattacacacaacacatcgccttcgcgcagtcgggtgctgccggtaggatgaagcaactggttatcacgaaacagtgccgcaatacgcgtctcttttggcatatgcaaatcgcgcagtgccgcgcccacgcaccatttatcggcactcaattgataaacaaactgctcccacggattttccggatgaatatccaggccaacgcgtgacaccggacgtcccactggcggaaccaccactttggcttttttagccgcccacgagagtgatgttccctgcaagagcagtgaaaccagaaccacaaagaaggcgacattaaagaacagacgtgcattctccagccccgccatcatcgggaacacggccaggatgattggcaccgcgccgcgtaatcctacccagctgataaacacgcgctcacgcagattgaaaccgcggaaggggagcaatccagcaaataccgaaaggggacgggcgaagaatatcatccatgcggacaaaatgagcgccggaatggcaataggcagcagatcgcttgggttaaccaacagccccagcaccaggaacatggcgatttgcgccagccaggcgaggccgtcgaaattttgcaggatgccgtagcggttgcgaatagggcgattacccagcagaaaaccgcacagatacaccgccagaataccgctaccttccagcgcagtagttaatgagaaaatcagaataccgccacttaatgccagcaatggatataatccggcgggcagggcgatgcggttgatcatttgcagtagtaaataaccgccgccaagacctattacaatgcccagaccaaattgttgcagaatatcgacaatgaacatccagctaatattgctctcatgatgctggatcatcgcaattagggtaatcgtcagaaagaccgccattggatcattactgccggattcaatttccagcgtcgagccaacacgttcgttaagccccttaccacccagcagagaaaagaccgctgcagcatcggtagagccgacgatagcgccgattaataagccttcaatcaaatcaagattaaacagccacgccgccatcatgccggttaaaccagaggtgataagcacgcccagcgtcgccagcgacagtgccggtcctaacgccacacgaaaggaactggcctgagtgcgcatcccgccgtcgagcaaaataatcgccagtgccaggttacttaccatgtaggcgaaggggtaattatcaaacgggataccgccgacgccatcgactcctgccagcatgccgatcgccagaaaaataaccagaataggaatgccaagacgggaagaaaatgaactaagtaatatactgctggtgacaaggatggatcctaagatgaaaaggctaattattgttgtggcatccaacggtcggttactcctgattacgctgtctcttatataaaccctaccatattagcggcagagacagcgttttacttagccctgaagcgtgatttttttacattttaagaacaggatgaccgctaatcgtcaactgagtgccttcccgggtgttattcagaatggcatgtgcgcccaacggcagcgtaaccgtgcgttgttcatgaccaaaatcgaggccggtaatgagtggaatcgacaggcgggaacgcaaaaacgcgtacactgactccaggttgtaacctgcgtcataatcattgggcgtgctgccgctaaagctaccgagaataatcgccttctgacgtggcaaaattcccgcatgatagagctgcaacagcatacgttcgacccggaaagggtgctcgttaatatcttccagcaccagaataccgttctcaatttttggcatccacggtgtaccgatcagtgaaatcagcatcgcaagattgcctccccacaacgtgccttcggcccgacatgtcgggccttccccttgccattcaatggtgaaggtttcattgcgtaacgccagccagaaatggtgctcggtaaaggcgttcagttcatccgcgccaaagtttgctaccagcatggggccgctaaaggtgatgacattgccatgcgccagaagaccgcactgaatggcggtaaaatcgctatgtccgcaaatgagcaacgggtcatgttgttggcgagccaccagtgcctgccagtcaatatctgccagtaaacgactggcaccgtaaccgccgcgtacagccagcacgatggtgttgggggtagtcagtctggcaagggaattgagatcttccagacgctctgtttccgtacccgcaaaacgctcacaacgacgggcaataacctcgacgttattgacttgatgccccgcgtcggtaaggcgctggataccacgcagcgcggcgtgctgtttaatgcagtaacccgatggggcaattaagtgaaacagagacatggcaattccttgctgacaacagaaacgaaatgtatatcatgccgcttaggtgtgccgttgtcacctcaacggcgattccaggctataaggatagaagaagtgaaattgagatggtttgcctttttgattgtgttattagcgggttgttcatcaaagcatgactatacgaacccgccgtggaacgcgaaagttccggtgcaacgtgcgatgcagtggatgccaataagccagaaagccggtgcagcctggggcgtcgatccacaattgatcacggcgattatcgctatcgaatcgggtggtaatccgaacgcggtgagtaaatcgaatgccattggtttgatgcagttaaaagcttcaacctccggacgtgatgtttatcgccgtatgggctggagtggtgagccgacgaccagcgagctgaaaaatccagagcgtaatatttcaatgggggcggcttacctgaatattctggaaaccggcccgctggcaggcattgaagatccgaaggtactgcaatatgcgctggtggtgtcatacgctaacggggcaggtgcgctgctacggactttctcgtcagatcggaaaaaggcgatcagcaaaatcaacgatttggatgctgacgagttcctcgaacacgtagcgcgaaatcaccctgcgccgcaggctccgcgctatatctacaaacttgagcaggcactggacgcgatgtaaatcagtcgcgcactttgtccgctttttcccgggcttctcgctcgagagagaaaataatccgctgtaattgccgctccaccgtcgggctgacgttaagaaaacggaagctcagacggggagtggtgatggtttcattcttgccatcaatcactttgcgctcgctgatggagattaactgggcgtcaaagtgaaaaacaccccattgccccatgttgacttcaatctgagcgaagcgcatgccttcttgtaattcggcaggctttgctgtttccagtaatgcgcccatgccgcctaacgacaaatcatacaggcggaaacgtaacgtactgttatccgccagtttggtctggcaaaaataaggcggatggagtggggcggagatgcggaaatatcggcgtcgttgtacaaaccataaggtgggaggcggtacggtaataaatgccggaagctgcaagtattcactctgctgtagttgttcaacagtaaactcgactttcgcaccctgagtttcggcggtaatggtaatgtgctgtgcctttagcacggcgatgttgtcttcggcttgactgccgaaatccagcaccagtttatccggggttattgccagtaatttgctgatcagctgcccgccattccaactgagacgcaaaggaattgcggctttgtgcaaatcgcgtaacacgcccaggacggctaacggattttgtttcaggaactgctcatggtaatgactcacgcggaaaaactcctgactgacaaactgtctttggtttatcggtcacagttaacaaaacttaatacaaatgcgtgaatattttttacatgttgttcttaaatcagccgacatacgcccagcatcgatcccgcccttgcctatacttagagcgttgatgtaagcatttcttgcgtccgattcatcgaaacgagggcctgaacatgggaattattgcctggattatttttgacctgatagccggcattatcgccaagctaatcatgccggggcgtgatggtggtggatttttcctgacctgtattctcgggatagtcggtgcggtggtcggcggctggctggcgaccatgtttggcattggcggctccatcagtggttttaatctgcacagcttcctggtggcggtggtgggagctattctcgttctgggcatattccgcctcctgcgaagagaataagattttcataaggcggatagcgatacagatgccgctatccgctttcacatcagaacgtatactcgacacctgctttacgggtgaaaaaaatcaatatagcacttcgatatccgataaagtcggttcccggtaacaacaacagaatccttttttaattattgtttcgttgtttttggtgtgattcagaaaataaatattttagacagtagccagtcaggcgttaaaaatggggcggatagtgaggcggttttggctgcgcttattgaacatttagaattgatcaatccttctggcagattaagccaaaatacccgttcggcaatgcttcagttacgcgaagaggaatggtctgaattctttttttggttgctaaattctctggagtgtctggattatgtgattattaatttaactccagaaagcaaaaaaacgttgatgagtgaacaccgtaacaatattcaggtagcaattgatgctttatatagccaacgtcggcgtaaatcgccgggtgatgaaagtgaaacacttacccgtagaaatgacgctatcttcggcaaccacgtatggcaaacatttgcgcaatacttcccgccaggacttgaaaaaccgtctgtgtagaaaaaaccatagctatggtgttatctgccgacaacgccatccggagaagccgaatgacgttgtcggagtaagcgctggttaaggtgtgggttgtgcctctttggttgagggttgcgtcgttgctgacttaacggtcggacgcgtcgccggaacattgtcacacggttgctctttcgggcagatcaaatccagcattttcagcgtcacgccattggtccagccaaagccatcctgtaatggatattcgccaccgccgccccccgttccggtggtgctgacatcatatttttccaccagctttttctcccggtcataggtgtgctgaacattggtcaggaagtgccagctaatgtccatcgccacctctttttgcccgtagttttgtaatccttctgtcgcgacccactgtaacggtgcccagccatttggcgcatcccattgttgcccacttttcaccgacgtggtgttcaggccgccgggttgcagcagatgtgttttcgtcgccgtcgccattttgttggcgcgatctttcgctgccgcattgacgtacagcgggaacagggcggccgcggttaactgattgcgcactttatgacttttcaggtcgtaatcggcataccagccttgttgatcgttccacaggtatttttcgatccctttttgacgggcatttgccagcgtttcgtactggtttgccatcgcgttatctccggcagctttgctggcgcgggcgaggattttttccattttaaacatcaggctgttcagatcgaccggtacgatgctggtggtgcgtaaggtatttaactgctgcgggttgtccatccagcgcgagctgaaatcccagccagacgcagcggcagagcgcaggtcgcggtaaatttcagtggcaggtcgattcggattgcttttggcggtggcaatatcttccacccatgactctggtcgtggcgtatcgcgatcgtcccagtagcggttgagaagggtaccatcctgaagtttgacaacgcgtttttcctgttgtccggcttgcaggttttcaacaccgtccatccagtaagcatattctttttgcatttgcggcaggtattgcttcaacgcggcatcgccttcatgctgcgccagtaactctaccatcagggcaaagaagggcggttgcgagcggcttaaatagtaactgcggttgccgttgggaatatgaccgtaagtgtctatttcatgagcaaaattggccaccatatccgcgactttatcccagtgaccgctttcggcaagtcctaacatggtgaagtaactgtcccagtaatatacctcgcgaaagcgtccgcccggcacgacataaggttccggcagcggtaacagagaatcccatttttcggtgttttcggtagaacgcgttaataccggccaaagtccgtcaatatgttcgcgcagtgactgcccctctggcggaacatatttctcgccttctttcggcagggtgaaattgacgttaacgaaatggcgcagatcaaatccgctctggttttgctgcatccgataatcagcaaggatcatcagcggatcgctgttcggcacggcatcggcaaaggttttttggtccggaaaaagtttggcgttttgcacatcattaaacagcggccctaataaaatatcaggcggctgtggtgttaccggtgtttcttctgcctgcaccgatagcgcagcgaaacacaaaaagatacaggctggaattaacgccattttttgcgggcgagaaggtgcgggggatttcatcaatcattctcctttggcgaaaccgaataaaacggtattcaagtatcagaaaaccttagttcaggatcgcactagctgcatgatcgaaatctcattctgcgaactgtcaggcattttagaaaagggaattaaagggataaataacggcgaaatagagtgatcaaataacgtctgtttattagccagccagcggcgttgggttcgtgattagcgaagaaaaatcatcataaattggtgaaaaatataacaggtagttaaaaaccattagtgctgagtaaattgccggatgacatcagaacgatgccatccgaacagtggcttaaccctgacggttgaaacgttgcgttttaacgtccagcgttagcgtttcttctggttgtatcgcatacagtttctcaccctgctggcaaatccagccaatccccagttcacgggcgattagggcgctgtgggataccggacttccggcgctaaggcagataccttttacaaccgccggatccagttgcagtactgtggaaggataaatgttctccgccagtagaatagttggcgagttaaactgcgggagttcttctttcgtttgggtcaggtggaccagggtgcgatgcagaagatcgtccacatcaatatagcgagcttgtagatattcatcatccagttgctggtattgctggctaagttctttaagaacttgctgccaggcatattctgccgtgcaatgttcatgctgaaggagttcgcttgccgccgccagcagttccggatcatctaacagtgtatggtgaccagaaaagattgcggcaatatcgtcaagcccgctggcttctgctttcgctgttaacgtcatcagatctaataacgtgaagtcaatagcctggcgtaatcgatcttgttcttcttccacggtcagggttgattttgcctgtaccgtacataaaactggttgataataaaaggctttacccgaaacaggcggaacgggacgcagagtaggtggagcgacttcctccgtttcaccaaagttatcttcagccagctgacggaaagcgatcagtgcctcttcagcttctggccctttcgcaatcaggcgcagcgtatcgttatagcgaacttgtagtaacgcaatctggttaatactctctggtgtgacgcatttgccgtttttttccagcaacatatcggcattaaatgtcgataaggtataaaccagccgggaggccggacgtacatgcaggccgttacggttttttatgaccaccgccagagaacgggcttcttcatcgtacgcaggacatgtgtcagagatttcagtgtcggaggacggtaaacccagttgttcacgtttggcttccagcgcatgcatggcgtcaaagataactttgtcgatatccgcccccgaggccgcgctgaccgttgctgccagtgtaccttcgaccaacggcgcagcacacaaacgtacttttgcggcgatctcgggagccagcaattccagcgcagtttcagcactcaataatgcgctacccatatccatcatgaccagcacatggtcggcatcagcaacagattcgatggcctccatcactttgacggcatcggtaccaatgggattttgtggatcgtcaattcccgcggcaatggcgattttacaactatcactcattaacatctgacgggctaattcaccgacaccttctcccagtcggctgctatgtgaaactatgaccaggtttaccatcaccaattccttactcttttgcggctaacgccaacatttgcatcataaacatcaccgaggtcgcgccgggatcctggtgaccaatactgcgttcaccgagataactggcgcggcctttgcgggcttgcatcgtaatcgtactttgtgcagcggattcggcgatgctactggcagcttcgagcgccaccggaacagagagattttgctcgctggactgacgtaacgattccaccaccggcacccacacatcacacatggttttatcgccaggttcggctttcccgcgactgattacgccgtccgcgccatcgcggaacatctgataaagctcttccagtgtcaggctttgccgtgcctgggtcgcctgtgcggcgcggataaagaaggtaccgaacagcggaccactggcaccaccgacgctggaaagcagcgtcataccggtattcttgagaatgaaaccgatatctttatctgcgatagcagggagtttttccaccactttgctaaagcctcggttcatatttagcccgtggtcagcatcgccaatttcgcgatccagtccggtaagatactcgctctcggtgctgaaaatatcgccacaacgagtgagccagttaacaatttgagttctgctcagtgacattgctttctccttatttaccccagttaagggccggggtgtggaccggggcgtcccagagtgccagcgtttcgtcatcaactttcagtaaggtgattgagaaaccggtcatatccagtgaggtgcagtacgcgccaattaaattacgttcgatagtcaatcccgcttgctggcaacgtgtggtcaggcggttatagacgccgtacagctcagaaagcggagttgcgccaagattgttaaccagcgcaatcacccgatcgccagactggagcggttgtttggtttgttgttcttcctgccaactgccttgttgataatcccagaaacgcaaagtgcgatggtatgagccatttaccagcagggtgtcgaacatttcatcgacggtttgatcaagggaagagaaggggcggcggtcaatacccggctcaccatgaatgccgacgccaaactccatctcattatccgccagggtaaaagaaggtttgcccgcggcaggaacggtacaggcaccgagagcgatacctattgagtggccttgattattcagcttacgccccagttccgcacaggcgtccagtgagtcgccacgctccgccgctgcgcctacgagtttttcaattaatacggtgttggcaacgccgcgtcgcccggcagtataaagactgtcttttaccgcaacgtcgtcatcaatgaccacagtggtcacttttacgccgctatcgtgcagtaactcggtcgctgtttcaaagttaagaatatcgccggtgtaatttttgataatcaacagtacaccttcgccgccatcaacttgcatggcgcattcaaagattttatcgggcgtcggtgaggtgaaaatttcgcccggacaggcccccgaaagcatcccctgaccgatataaccacagtgcatcggctcgtgtccgctgccgccacccgacagcagggcgacttttcctgcaacaggggcatcagctcgggtgacatacaccggatcctgatgcagtgtcagcgatggatgcgctttcgccagtcctgccagttgttcgtccagtacgtcttgcacatcattgatcaattttttcattattttgctccagcaattacggtagggcatggatgatgttcaacgacacggcgaccactgactgccgatgaatccattgtgcatcaggcaagggaaaagaaaattagcccaaattatgtttcatagtgaaacatatgctttaatgaatgttccatattgaaacttttacgtgtattaatacttaaaattgcgagccggaacaccttttgtcataagggatgcgggatatgagtggcgcttttaacaacgatggtcggggcatatctcccttaattgcaacctcctgggagcgatgcaataagctgatgaaacgggagacatggaacgtaccacatcaggcccagggcgtgacatttgcttctatttatcggcgtaagaaagcgatgctgacgctcgggcaggctgcgctggaagatgcctgggaatatatggcaccgcgagagtgtgcgctgtttatcctcgatgaaaccgcctgcattctcagccgtaatggcgatccgcaaaccttgcagcagctaagtgcactgggattcaatgacggcacgtattgcgccgagggaattattggtacttgtgcgctatcgttagcggctatctctggtcaggccgtgaaaacgatggccgatcaacatttcaaacaggtactctggaactgggccttttgtgcaacgccgttgtttgacagcaagggccgattgacgggaacaatagcgctggcgtgtccggttgagcaaactaccgcagctgatttgccgttgacgttggcaatcgcccgcgaggtcggaaatttactgctgacggacagtttgctcgctgaaactaaccgtcatttaaatcaacttaatgccctgttagaaagtatggatgatggcgtgattagctgggacgagcagggtaatttgcaatttattaatgcccaggcggcgcgggtcttgcgccttgacgcgacggcaagtcagggacgggcaatcactgaactcttaacgttacccgccgtattgcaacaagcaataaaacaggcacatccgctcaaacacgtagaagcaacctttgaaagccagcaccagtttattgatgcggtgataacccttaaaccgataatagaaacgcagggaaccagctttattttgttgctccatcctgtggaacagatgcggcagttgatgaccagtcaattaggaaaagtcagccataccttcgctcatatgccacaggacgatccgcaaacccgccgcttgattcattttggtcgccaggcggcgcgcagtagctttcctgtcctgctttgtggagaagagggcgtgggcaaggcactgctaagtcaggcaattcataatgaaagcgagcgtgctgcaggtccttatatcgccgtcaattgtgagttatatggtgatgctgcgctggcggaagaatttattggtggcgatcgcacggacaatgaaaatggccgtctgagtcggctggaactggcacacggcggcacgctgtttcttgaaaagattgaatatctggcggtggagttacagtctgctttgcttcaggttatcaagcagggggttatcacgcgactggatgcgcggcgtttaataccaattgatgtcaaagtgattgcaacaacgaccgcggacctcgcaatgctggtggaacaaaatcgttttagtcgccagctgtattacgcgctgcatgcatttgaaattaccatcccgcctctgcgtatgcggcgtggcagcattccggcgctggtgaataacaaattacgcagtcttgaaaaacgcttctctacgcggctgaaaattgatgacgatgccctcgctcgcctggtttcttgtgcatggccaggcaacgattttgaactttacagcgtcatcgagaatcttgctctgagtagtgataacgggcgcattcgcgtcagtgatttgccggaacatctgtttaccgagcaggcgacagatgatgtcagcgccacccgcctttccaccagtctgtcatttgcggaagttgaaaaagaggcaattattaacgcagcccaggtcacaggcggtcgcattcaggaaatgtcggctttacttgggatcggccgcactacgctgtggcggaaaatgaagcaacatggcattgatgcagggcagtttaagcgccgggtatgaaagacagaaacgatttctgatacatcagagtgatctgtatttcattccggcgcacgctaacaattttcagcatcgtttaagggcttgtctatcccgcacttaaaagctgaagcgatatcctccgttgacttgcttctgatcaaagaggttaccctgcgtgtaatccgcttcgagatagaatgtgtgctgtttgttatactgtgcactgactcccacgccgttattccagccattacctttgaaactgtacttctcccgggagttgttcaacagatattcggtatcccctgaaaactcgcggatagcgccagtcttcacatagacattcagctggctgttgcctgcggtgatgtcataccccagtatcatgctggcacgccccagcagcgattcgtagtgattcagatgtatattgaggccattactcgccttcatagtcatctcattctggtggctgtatgtaagctgggtttgcggctctatatagaacccataaccagtaggggacaggttgaacctctgcccggcttccagggagatgctcattccattcgcagtgccgttggcgttaacgccgttgttctgactgtccagtacgtggaaactatttttctggcgcgatgcttttataacgagatcgctgtaaaaaccgttttgtgccatgtaactggcgtacattcccatgtagtctgaacgtgcggtaccgtcgcctccgctatagtccggcgatgcatgtgttgagccaatatacagaccgacatacaacggcattacatcagagagacgtttatccccaccaaactggataccgctgtaacccatgtcaaagccgctcagtttgccactggcaaaggagtccaggcttcccccataactgcgcaaccagatattaccgtctttactctgatttcgcaggtcacccatccgttgcatcagcgtacggttttcaacatagttcaataagtaaccgacattgagataattgccgccagcatctgcggtcgtggtgggtttaggcgtgggagcgggttcaggcgtaggatcggggttgactatgggaggctgagcgggagctggtgtgggttcaggattaggagtcggttccggaactgtcccggaagcgtaaagctcccagttagtgccatttttacgcacatcgtacagatatccccccaactcaacctgagaagacgcgctgaacgaggccgcgccgtcagtggtttttaccactgtcagaacttcatttcccgttgtggcctcgctgccctggttgcggatagccaatacgtgattaccagcactactcccgctgatattcaataaatcccctttattattaacgccattaccctcgccaacaacatcagcacgcataataaaggtactgttaccgctcaggttctctacgtttaatgtggcaaatgtgccggcagttgacccgtggctggcaaaatcgacagttgaatggctcagcgccagcgtgtcgagattagaattacttgttacgttccagacgctgttattcattgcaacgtccagttttccgccattgacattatcgctgagggaggaacctgtccaaaccgacccagggtgcatatccagattgattagcccacctttggaaagaacgctaccgttgataagcatacgacccgaggcgttgatgcggctggcggcataaccatcgtcatgttgcgttgcgatggccatctggtcgggtgtactcatatcaatgaccagatcgctcgtgaggtcgatctggctgttggtcatggcataaattcccctggctcctgccgcgccggtgatagccaaactgtctccggttattctaccgccgctgagagcccacaaacccagcgccagactgccattacgatcaactgtaatatcggtattttgcatgttgacaacagccgttgccgtctgggccgaggcaccataagaaccgccggaaaagatgctgtttcgttgcgctgccgtgccagtaaaattgattatcgcgtctgaaccactggtgacgaggccaccgccctgcgcggaagaaatatggctatctgcaccgatagtggttgtaccaccacgaacttcgacgccattggccgcggctccagttacatcaacagtgagtgcattcgcgctaacctggccaaagctccagaggccgtgagcattatcgccattggttttaatggtactgtttgttccgagatcgacaacagagtttttctgtacgtttatccccatggcgctgtagccctgaacatcgattgtcaggtctgtagccgtaaaacgcgcagcaccattggcgttattgccgttgagaccaccgatataaacacctgtacttccatcggtcgtgattttacttccgcttccaagatcgacactggtgccatagtcattgatggttaggcctataccgttcgagttttcaatggtgaattgagtggctgttagtgttgagctatgcccaataatgatgccgtcatcgttactcttaatggtgctgcctgtgcctaagtcagcatgggtatagtcaccaattaagttaatgccgatggcagaggtttgaccaacaacatctactgtgagtcggttagctgtcagggagctgtttttgccctgaataatgattccttttgcatatccagaggcgtcgttgacattgacggtgacatcattacccaggttgatattgccaggcgtgtttcctgctggggtcattacaccatagaggtttcctgatggatcggcggtatctcctgtaattctgtcaccatcattaatagtaatattggtgccatattgacttcctgtatcagcagctatcagcaggggggaaaagataattgcattcaaaccaatagcgccaaattttatcagttgaattgagggcgaacggatttttaattcagcgagacgatctgctttggtattcccattgtgttgtttgatgcccataccactcctatatagtacccagactatgggtctatggattttgtcattttgtttaaatcaatgaataatatcctcttatcatcatgatatttgtatggtgcaatcatgatgagcttctcagagaataattctctattaccgggcaaaatcaggaacacaggaattaatatatatttaacatcccccttacaaaggtgagtttatatcgagttattccctaagttgtcgttacttattccaattcgttactataaatatggcaaaaatattacaacaaacagcggttaaaaaatttggtgaagattttttgtaataatcctaattagttatgggaatttcgcttgatgtatctgcataacaaaaacaatatgcgccatttttgcattactaataagaaaaagcaaaaaacatcgatattcatttttggtcaatgggttttctggcctatcgttgttattgtgctactggttatcattttcatcttgccagcatattggagcgtgatcaattttgatcagctgtgaagggggctgatgtgtagtgatacaaaaacttacgttatatcactgctaatgagatatccggcatctgaacacttatgtctttaattattctcgtggttcactataggcaataagcacaaaagtgtaggatgttacaagaatgattaggactcggtgaaatgaaaaatccacgcaattgcgtggattttatatacttttgcgctcttcatgagatttagcgaaacctcatgagacaataaattaattagacgttgaaaaggaagttcatcacatcgccatctttcacgatgtaatctttaccttctgcacgcattttgcctgcttctttcgcgccttgttcacctttgtaagtgatgaaatcttcaaacgagatggtttgtgcacggataaagcctttttcaaaatcagtatggattttgcccgctgcctgcggcgcggttgctccaaccggaatggtccatgcacgcacttctttcaccccagcggtgaagtaagtttgcaggttcagcagtttataaccggcacggatcacacggttcaggcccggctcttccagcccaagctcctgcataaactcgtcacgttcttcgtcgtccagttcggcaatgtctgcttcaacagcagcacaaaccggaaccacaacagaaccttctttcgccgcgatttcacgcacctggtcaagatatgggttgttttcaaaaccgtcttcgttgacgttggcgatgtacattgttggtttcagcgtcaggaagctcaggtaacgaatagccgctttctcttcagcgcttaaatccagcgcgcgcagcatacctgcattttccaactggggcaggcatttttccaggaccgccagctcagctttcgcgtctttatcgccacctttggctttcttctgtacgcgatgaatcgcacgttcgcaggtgtcgaggtctgccagcgccagttcggtgttgataacttcaatatcgtcagccgggttaactttgccggaaacgtgaatgatgttgtcattttcaaagcagcgaacaacgtgaccgatcgcttcggtttcacggatgttggtcaggaactggttacccagaccttcgcctttcgatgcgccttttaccagaccggcgatatcgacaaattccatggtcgtgggaagcgtacgctgcggttttacgatttcagccagttgatccaggcgaggatcaggcattggtacgacgcctgtgttcggctcaatggtgcagaatggaaagttggccgcttcaataccggctttggtcagcgcgttgaacagggtagatttcccgacgttgggcaaaccgacgataccgcatttgaatcccatgatttaaatcaccttaatatcttaataatcaacctgttattgctaacagattgcagaaatggaaataactttgcctattatacacggcactcggcaaaaatgccgcagacaacgacttattgcgctttaaaggcgtgcaatcggttcgttgctttggtcaagccatctgtaaaccacatttcagtacaacgcgccgcttcgtcaatggcttcatcaattaacttctgttcactaacaggcggtttgcctaacacaaaaccgacaactttatttttatcgcccggatgaccgattccgatgcgtaaacggtgaaagttagggttattacccaatttactgatgatgtctttcagtccattgtgaccaccatggccaccgcccaatttaaatttggcgacgccaggaggcagatccagttcgtcgtgggccaccagaatttcgtccggattaatgcggaaaaaactggccatcgccgcaacggctttgccgctgagattcataaatgtagtcgggactaacaggcggacatcttcgcctccaagagtgactcgcgaagtataaccaaagaatttagcctcttcgcgcagcggagcgcgcaaacgctctgccagtaagtcaacgaaccaggcaccagcattatgtcgcgttgcggcgtattcagcaccggggttcgccaggccgacaatcaatttaatcgtcacgtttttttgtcctgagtgtgtacataactggcgcgtagtttactggttgcggccccgcttgacaaaaaactgcgtatcaaatgcagataacgtaataattgcctgagtggactattagaaagtcaaggtgttcaggcgtttatttgtaaagttttgttgaaataagggttgtaattgtgatcacgcccgcacataacccactgggtgttgtctatactttacacataaggaagaggggtattccctgttacaacccagaaagttccggaggtgacatatgaaacgcaaaaacgcttcgttactcggtaacgtgctcatggggttgggtctggtggtaatggtggtcggcgtggggtattcaatcctcaaccagttaccacagtttaatatgccccagtatttcgcacatggtgcagtgctaagtattttcgtcggtgccattctctggctggcgggtgcccgtgttggcgggcatgaacaggtgtgcgaccgttactggtgggttcgccactatgacaaacgttgccgccgtagcgataatcgccgtcatagctaacaaataatgcagtttgctgaccagtcagtttgcgctgactggtcaatctcgtacttataaatccgccatcgccgcgcgacgattcgggaagaacgccaggcgtcccgggatcggttgaatgccagcgcgagccatagtgcgcagtggctggaattccacgttgcacacgcgcagttcacatccctcgggcagacgcttcacaaaacgctggaacgcatcaagaccaccagcatcaagtaccggaacggcatcccacttcagaatcacaatccgtttgccttcaagacgtgactccaggtccgtgaataagccttcagcagcagcaaaaaacagcgggccaataacgcgcagaaccaggacatcgtctggaacatctacgactaccggtgccaggcgagtcatacgtgcgatacgacgcataaacagcagcgatgccagcacgatccccacgctgatggcaataaccatatcaaacaacacggtcagcgacatgcacagcagcatgacgatgatgtcatctttcggcgcatgacgcagcaagtcgaccactttgtgcgcttcactcatgttccacgccaccatcaacagcagggctgccatggcggaaagcggcagccaggagagcagcggtgccagtaccagcagggcaagaataaccagaatagagtggatcaccgccgagataggggacgttgccccggcacggacgttagcggcagaacgcgcgatggcagctgtagcggtaataccaccaaagaacggagcgataatattccccagtccctgtccaaccagttcgctgttcgccttgtgtttcgtcccggtcataccatccagcaccacggcgcagagcagagattcgattgcgccgagcattgccattgagaatgccgcaggcagcagtgtgcgaatagaatcccaggttagcgtgaattctgaattaggcagatcccacggcagcaccagttgcggcagcagttgcggaataccgttaccctgagaaccatcggccaggacgtagtggaattgcgaaccgatggtagcaacatgtccgccgagcaggttaacaatccccatcaccgcgcaaccagccagcaaggccggaaggtgaccgggtaaacgaatgcccagacgcggccaaaaaacaagaatacctagcgtcacaatgccaatggcagcatcacccacattaatggtcggcagcgccataaataatgcgccgactttttgtagataatgttccgggacatgggccatttgcagaccgagaaaatctttaatctgcatggtaccgatggtgatcccgatacccgaggtgaaacctaaggtgacggaaaccggaatatactcaatcaggcgaccaaagcgtgccagacccatcagaatcaaaaagatccccgacagcaaggtcgcaaccagcagtcctgccagtccaaactgttgcgacacgggatagagaattaccacaaatgccgcagtcggaccggaaacgctaaagcgtgacccacccgtcagagcaatgacaatccccgcaacagctgcggtatataaaccgtactggggtgccacaccactaccaatagccaacgccatcgccagcgggatagcaataatcccgacggttatcccggcaatcaggtcacgggtaaaccgtgcggcagtatatttttctttccagcaagcgtcgatcagagcgcggaaaggcatcacatgtgaggaaaatattttgttcacaataatgtttcatccgtgagcgcatcatctgtcaactaaatggcaggtgaaggaggcataggtcatacaaatggatattacagacaaaaaaacccgccgcagcgggtctttgagccgggttcgattagtgttcgaacatggcagagatcgattcttcgttgctgatacgacgaatcgcttcggccagcatacctgacagggtcagagtacgcacgttcggcagtgatttgatttcatcgctcagcggaatggtatcgcagacaacgacttcatcaattacagagttacgcaggttgttcgccgcgttgccagagaagatcgggtgagtcgcgtacgcaaatacacgtttagcaccacgttctttcagagcttcagcagctttacacagcgtaccgccagtgtcgatcatatcatcgaccagtacgcagtcacgacctgcaacgtcaccgatgatatgcatcacctgtgaaacgttcgcacgcggacgacgtttgtcgatgattgccatatcggtatcgttcagcagcttagcgatagcgcgggcacgcacaacgccgccgatgtccggagaaaccacaattgggttatccagattcagctgcagcatgtcttccagcaggatcgggctaccaaatacgttatcaaccggaacgtcgaagaaaccctgaatctgttcagcgtgcagatccactgtcagcacacggtcaacaccgacgctggagaggaagtctgcaaccactttcgcagtgattggtacacgagcggaacggacgcgacggtcctggcgcgcatagccaaagtaggggataacagcggtgatacgacctgcggaagcacgacgcagggcatcaaccataacgactaattccatcaggttgtcgttagtaggggcacaagtggactggatgatgaaaatatcaccaccgcgtacattttcattaatttgtacgctgacttcgccatcgctaaagcgacctacagcggcgtcgccgagtgaagtgtacaggcggttggcaatacgttgtgctagttccggggtggcgttaccagcaaaaagcttcatatcaggcacgagaagaacctcaggcatgcgtccattggtggaaagaatctgccgaaaactgtgcgggccaggcatgatcctttccaggcggtgtattaaagagcgcgatgcaacgtctggaacaaggtgacgttgtcaccgaaactcagcttgcccggcttaaagcatggctctgtgcaatggggaaagattagcgcctttcgccacaaagccattgagccattccggggcttgctctagcacctggcgggcttcagactctgtatcaaattcagcaaagacacaggcccctgtcccagtcaggcgcgacggggcgtattctaacagccaggaaagcaccgcatcaacctcgcgaaaacgttttcttgcgataacctcgcaatcattgctgaattcacattttagcaacgtttctattgacctttttggcgtattgcgcgggagttcaggatctttaaaaatcaccggagtcggaatacttacaccagggtgcgccaccagataccacttctctggcggatccaccggcgttagtatttcaccaacgccttcggcaaacgcggcatgcccccgaacaaagacaggaacatctgcgcccagcgtcagccccatttccgccagctcatccatgcttagcccgcattgccagagatgatttaatgccaccaggaccgtcgcggcattggatgaaccaccgccgagaccgccgcccatcggcaaacgcttgtcaatgctgatattcgcaccgcttcccgtcggaagacgcccgctgtctgccgcagttttcatcaacaatcgcgctgcgcgaacgatcaggttatcttcatgttccacgccttcaacgggcgttaacagacgaatatccccatcgtcacgaagctcaatgctgatggtgtcgccgtaatcaagaaactgaaacagcgtttgcagcgtgtggtaaccatccgcacgctgaccggtaatgtataaaaacagattaagttttgccggagagggccactgtgtccgcattatttcactatccagttatccatttttaacttgatgcgttgaccaccgtcggtgagttccatattggctggcatcgcaggttgcgttttggtgtcataaccaccataaacaaccttccagtttttgccattctggctgtaggtaatttcgctcaggcggtactggtcgtccagtttgtagtcggttgcatcacccggtaaacctaaaatccactggcgcaagctgttgagcggaattggcattccggtcaatttgccaatcatctcttcggcgtcatcggcggtataacgctgacctttattgtcgactaactgcacgttacccggttgagcattcagctccagttccgtgctgcccaatgggttagtgagcagcagacggtagcgatcctggccggtttgctgccagaaaaagcgggcgtacactttttgttggtcagaaatataagcgaacgcgccgcgagtctgatactgattaagattgcgcacgtcttgctgatgctgacgccattgtggcgaatccgggcttttgccaggacctttgggcgtggtaacggaacaggcagtgagcacaagagcagccagcggtagcaggcggataagacgaaaatcgggcaggggcatagtgatgacaagtccttgagatacgttgcagttataacccttaatgctagcgttaccgtccgctatcgtctatgttcaagttgtcttaattgccagaatctaacggctttcggcaattactccaaaagggggcgctctcttttattgatcttacgcatcctgtatgatgcaagcagactaaccctatcaacgttggtattatttcccgcagacatgacccttttagcactcggtatcaaccataaaacggcacctgtatcgctgcgagaacgtgtatcgttttcgccggataagctcgatcaggcgcttgacagcctgcttgcgcagccgatggtgcagggcggcgtggtgctgtcgacgtgcaaccgcacggaactttatcttagcgttgaagagcaggacaacctgcaagaggcgttaatccgctggctttgcgattatcacaatcttaatgaagaagatctgcgtaaaagcctctactggcatcaggataacgacgcggttagccatttaatgcgtgttgccagcggcctggattcactggttctgggggagccgcagatcctcggtcaggttaaaaaagcgtttgccgattcgcaaaaaggtcatatgaaggccagcgaactggaacgcatgttccagaaatctttctctgtcgcgaaacgcgttcgcactgaaacagatatcggtgccagcgctgtgtctgtcgcttttgcggcttgtacgctggcgcggcagatctttgaatcgctctctacggtcacagtgttgctggtaggcgcgggcgaaactatcgagctggtggcgcgtcatctgcgcgaacacaaagtacagaagatgattatcgccaaccgcactcgcgaacgtgcccaaattctggcagatgaagtcggcgcggaagtgattgccctgagtgatatcgacgaacgtctgcgcgaagccgatatcatcatcagttccaccgccagcccgttaccgattatcgggaaaggcatggtggagcgcgcattaaaaagccgtcgcaaccaaccaatgctgttggtggatattgccgttccgcgcgatgttgagccggaagttggcaaactggcgaatgcttatctttatagcgttgatgatctgcaaagcatcatttcgcacaacctggcgcagcgtaaagccgcagcggttgaggcggaaactattgtcgctcaggaaaccagcgaatttatggcgtggctgcgagcacaaagcgccagcgaaaccattcgcgagtatcgcagccaggcagagcaagttcgcgatgagttaaccgccaaagcgttagcggcccttgagcagggcggcgacgcgcaagccattatgcaggatctggcatggaaactgactaaccgcttgatccatgcgccaacgaaatcacttcaacaggccgcccgtgacggggataacgaacgcctgaatattctgcgcgacagcctcgggctggagtagcagtacatcattttctttttttacagggtgcatttacgcctatgaagccttctatcgttgccaaactggaagccctgcatgaacgccatgaagaagttcaggcgttgctgggtgacgcgcaaactatcgccgaccaggaacgttttcgcgcattatcacgcgaatatgcgcagttaagtgatgtttcgcgctgttttaccgactggcaacaggttcaggaagatatcgaaaccgcacagatgatgctcgatgatcctgaaatgcgtgagatggcgcaggatgaactgcgcgaagctaaagaaaaaagcgagcaactggaacagcaattacaggttctgttactgccaaaagatcctgatgacgaacgtaacgccttcctcgaagtccgagccggaaccggcggcgacgaagcggcgctgttcgcgggcgatctgttccgtatgtacagccgttatgccgaagcccgccgctggcgggtagaaatcatgagcgccagcgagggtgaacatggtggttataaagagatcatcgccaaaattagcggtgatggtgtgtatggtcgtctgaaatttgaatccggcggtcatcgcgtgcaacgtgttcctgctacggaatcgcagggtcgtattcatacttctgcttgtaccgttgcggtaatgccagaactgcctgacgcagaactgccggacatcaacccagcagatttacgcattgatactttccgctcgtcaggggcgggtggtcagcacgttaacaccaccgattcggcaattcgtattactcacttgccgaccgggattgttgttgaatgtcaggacgaacgttcacaacataaaaacaaagctaaagcactttctgttctcggtgctcgcatccacgctgctgaaatggcaaaacgccaacaggccgaagcgtctacccgtcgtaacctgctggggagtggcgatcgcagcgaccgtaaccgtacttacaacttcccgcaggggcgcgttaccgatcaccgcatcaacctgacgctctaccgcctggatgaagtgatggaaggtaagctggatatgctgattgaaccgattatccaggaacatcaggccgaccaactggcggcgttgtccgagcaggaataatggaatatcaacactggttacgtgaagcaataagccaacttcaggcgagcgaaagcccgcggcgtgatgctgaaatcctgctggagcatgttaccggcagagggcgtacttttattctcgcctttggtgaaacgcagctgactgacgaacaatgtcagcaacttgatgcgctactgacacgtcgtcgcgatggtgaacccattgctcatttaaccggggtgcgagaattctggtcgttgccgttatttgtttcgccagcgaccttaattccgcgcccggatacggagtgtctggtggagcaggcactggcgcggttgcctgaacaaccttgccgtattctcgatctcgggacgggtaccggggcgattgcgcttgcgctggctagcgagcgcccggactgcgaaattatcgctgtagatcgtatgcctgatgctgtctccctggcacaacgtaatgcccagcatctggcgatcaaaaatatccacattctgcaaagcgactggtttagcgcgctagccgggcagcagtttgcgatgattgtcagcaatccgccgtatattgacgagcaggaccctcatcttcaacaaggcgatgtccgctttgagccgctcactgcgctggttgcggcagacagtggaatggcagacatcgtgcatatcatcgaacagtcgcgtaacgcgctggtatccggcggctttctgcttctggaacatggctggcagcagggcgaagcggtgcgacaagcatttatcctcgcggggtatcatgacgtcgaaacctgccgtgactatggtgataacgagcgcgtaacgctcggccgctattatcaatgacaagtttttctacactgcttagtgttcatcttattagtatcgcgctttctgttgggctattaaccttacgtttctggctacgttatcagaagcatccacaggcatttgctcgctggacgcgcattgtgccgccggttgtcgatacgctgttactgttaagcggcattgcgttgatggctaaagcgcacatcctgccattttccgggcaggcacagtggctgactgaaaagctgtttggagttatcatttatatcgttttgggttttattgcactcgattatcgtcgtatgcacagtcagcaggcgcgcattattgccttcccgctggcgttggtggtgctgtacatcatcattaaactcgccaccacaaaagtaccgttactggggtaagtcatgagatcgttagctgatttcgaatttaataaagcgccattgtgcgaaggcatgatcctggcttgcgaagcaatccgccgcgattttccctcgcaagatgtttacgacgaactggagcgtctcgttagtctggcgaaggaagaaatcagccagcttctgcctttagaagagcagttggaaaaactgatcgcgctgttttacggcgactggggatttaaagcctcacgcggtgtttatcgtctttccgatgcattatggctggaccaggtgttaaagaatcgacagggcagtgcggtatcattaggtgcggttttattatgggtcgcgaatcgtctcgatttgccgctgctgccggtgattttccctacgcagctgatattgcgcattgaatgtccggatggcgaaatttggctgattaatccttttaacggtgaatcgttaagcgaacatatgctggacgtatggttaaagggaaatatcagcccgtcggcggaactgttttatgaagaccttgatgaagctgataacattgaggtaatccgcaaattgctggatacactcaaagcctcgttgatggaagaaaatcagatggagctggcgttacgcaccagcgaagctttattacaattcaaccctgaagatccctatgaaattcgcgatcgcgggttgatttatgcgcaactggattgcgaacacgttgcgttgaacgatttaagttatttcgttgaacagtgtccggaagacccgatcagcgaaatgatccgtgcgcaaataaataacatcgcgcataaacatattgtgctgcattaattaatcgacattttactcaagattaaggcgatcctatgaaacaaaaagtggttagcattggcgacatcaacgtagcaaatgacctgccgttcgtactgtttggcggtatgaacgtgttggaatctcgcgatctggcgatgcgcatttgcgagcactacgtaactgtgacccagaaactgggtatcccttacgtgttcaaagcctcttttgacaaagccaaccgctcctccatccactcttatcgtggaccgggcctggaagaagggatgaaaatcttccaggagttgaagcagacttttggcgtgaaaattatcaccgacgttcacgaaccaagtcaggcacagcccgttgctgatgtcgtggatgtgattcagttgccggcgtttcttgctcgccagactgacctggttgaagccatggcgaaaaccggtgcggtaattaacgtcaagaaaccacagtttgtcagcccgggacagatgggtaatatcgttgataaattcaaagaaggcggcaacgaaaaagtgattctttgcgatcgcggtgctaacttcggctatgacaacctggttgtcgatatgctgggcttcagcattatgaagaaagtgtctggtaactcgccggtgattttcgacgtgacccacgcactgcaatgccgcgatccgtttggcgcagcttccggtggtcgtcgtgctcaggtggctgagctggcacgagccggtatggcggtaggtctggcggggctgtttattgaagcgcatccggatccggaacatgcgaaatgtgatggtccatccgcgctgccgctggctaaactggaaccgttcctcaagcagatgaaagcgattgatgatctggtgaaaggtttcgaagaactggataccagcaagtaatcttttttgcttgaaaaataaagtattagcgttctgcgttaagacttttttcatgggtgccggatacaaaaaaggccgcaggctgttacccctgcggccggtttcgggcgcatattgccatcacggcagcctgacgcccgttttcaccttacttccggttacgccaccagctgacaatcgctgcggtaataattcccgccaggatcggtgctgccaggtcgtgccagaaaatcatggcaaactgcgcgagcgtcatatagccgccttgttgtaatgacaacattttgcggctattcttgaattgttctggttcaagattagcccccgttctgttgtcaggttgtacctctcaacgtgcgggggttttctctttccagcaaccaatgccaccagggataaagcccccgcaacattgcgcctcaccggataacgccggcttggtgtggatactacgactcaattcatcttcacttcatccctgaaatgtttgcaatgaagagtgcattccggtttttcaacagctgttacagtcatttcatgagtgctctggatgaggcttccagctcgggttgccaatatttacttgtggaagtgataaagacaaaaatggccgcaggctgttacccctgcggccggtttcgggcgcatattgccatcacggcagcctgacgcccgttttcaccttacttccggttacgccaccagccgacaatcgctgcggtaataattcccgccaggatcggtgccgccaggtcgtgccagaaagtcatggcaaactgcgcgagcgtcatatagccgccttgttgtaatgacaacattttgcggctattcttgaagtgtctggtttcaagattagcccccgttctgttgtcaggttttacctctcaacgtgcgggggttttctctttccagcaaccaatgccaccagggataaagcccccgcaacattgcgcctcaccggataattccggcttggtgtggatactacgtctcaattcatcttcacttcatccctgaaatgtttgcaataaagagtacattccggcttttcaacagctgttgcagtcgtttcatgagtgctctggatgatgcttccagctcgggttgccaatatttacttgtggaagagataaagacaaaaatggccgcaggctgttacccctgcggccggtttcgggcgcatattgccatcacggcagcctgacgcccgttttcaccttacttccggttacgccaccagctgacaatcgctgcggtaataattcccgccaggatcggtgctgccaggtcgtgccagaaaatcatggcaaactgcgcgagcgtcatatagccgccttgttgtaatgacaacattttgcggctattcttgaagtgtctggtttcaagattagcccccgttttgttgtcaggttttacctctcaacgtgcgggggttttctctttccagcaaccaatgccaccagggataaagccccgcaacattgcgcctcaccggataacgccggcttggtgtggatactacgtcgcaattcatcttcacttcatccctgaaatgtttgcaatgaagagtacattccggcttttcaacagctgttgcagtggtttcgtgcagggtgtggtacaggctcgcaattctgattaacgacctgtccaggtagtatgaagaaatacaataagcaggaatttatattatctcccccgattaccgtcatcggaggagatataactgtcaggcaaatatcgtcatcaaataggcggcaaacagtgccagatgcgctgcgccattgagcacgttagtacgtccggtggagaaggagatatggcacagcactaaagaggccaccatcaccaccatttctggcgcaccaagtgcaaactgcaattcgttacccgtcataaaggcaattagcgtgacgacaggtacggtaagcgaaatggttgctaacactgaaccaaagaacagattcatcgcgcgctgaacctggttgttcaacactgcttttaatgcacctaaaccttccggcgacagaatcaacagtgccaccaggaagccagtaaaggcgacaggggcattcatgctgtcgagcaatgtctccagcgagctggcgttcattttggtcaccgcaataacggcaatcagatggataatcaaccagatagcatgccacaggctgctatgggcagacggtttaccgtgatgcgggtcgtcatcatcactgtcatcttcgtgctcgtagacaaacaaactttgatgcgttttggtctggatcagcaaaaatacgccatacattgccgcagaaattaatgctaccagtaacgcctgaccggttgaaaaattcgccgcaggcagagccattggaaataccagtacgattatcgccagggggaacagcgcaattaaatactgcttgataccaaacagattcatatattgggtggcaaacttacgaccgcccaacaataatgaaaagccaaccagcccaccggtaacaatcataatgattgaatagagcgtatcacgcattagcgttggcgcggcgtcgccggttgccattaaagctgaaatcaaactgacttcaagaataaccactgaaaggctaagaataagcgaaccgtaaggttctcccaggcgatgggctaatacgtccgcatgacggacaacactaaaggcgctacttaaaataccaataagcgcaagaagattgatggcaatgaccactggtagtgtctggctgcttccccacaggaacagcactaccagcgccagaaccgggaaaataagcgaagtctccttgtggcgggtttttaccgcctcttgagcatttgacattatggttatccctttgcagatgaatttatcgaaaatgtaaaaaataggtaggaaaaataacagaaagtgtctggatatcggtaacattttacgaatttttaccccgctgtcgattttttactcattggggcataaaaataagtattacgtttagacaatgtttgttttagcgtctcttaagaagagtctgacctgaaaattcttatgttttggcaagagtagatattgttgaccacacttaatgttcaactttgtaaaaggagtcaacgatgccgtataaaacgaaaagcgatctgccggaaagcgtaaagcacgttctaccgtctcatgcccaggatatctataaagaagcgttcaacagcgcatgggatcaatataaagataaagaagatcggcgtgatgacgccagtcgcgaagaaaccgcgcataaagtggcctgggctgctgtgaagcatgaatatgccaaaggggatgatgataaatggcataaaaaatcgtaaaaccggtcgcttagttaaagctattcgtgcggtgttgccttgcaagtggtccgtggattgcatattgtcccgttagtggtttcaaaatgagcagtaaaaatgtccggaagacaccaaaaagttgtcgcagggaagtatgcagtggcggaagtgtaaggtgataacgcgtgatttcttgatgaatgccgattgtaaaacggcatttggtgccattgaagaatcactcttatggtcagcagaacaacgggcggcttcgctggcggcgacgctggcttgtcgacctgatgagggaccggtgtggatcttcggctatggatcgttgatgtggaatccggcactggagtttaccgaatcgtgcaccggtacactggttggatggcatcgcgcattttgcctgcgcctgaccgccgggcgcgggactgcgcaccagccgggacggatgcttgcactgaaagagggcggacgcaccacaggcgtcgcctatcgactgccagaagagacgctggagcaggaactaaccctgttgtggaagcgagagatgattaccggctgttatctgccaacctggtgtcagcttgatcttgatgatggacgcacagtaaacgccattgtgtttattatggacccgcgacatccagaatatgaatctgatactcgcgctcaggtcatcgcgccgttgattgcggcggcgagcggtccgctgggaaccaacgcacaatacctgttttcactggaacaggagcttatcaaactgggaatgcaggacgatgggctgaatgatttgctggtatcggtaaaaaaactgctggcggagaattttccggatggtgtgttacgtccgggattcgcctgagtaaacttcccgcatagtggggcgtcagacgccccctcaaacattaaaatgtgagcactttatcggctgacagcgtccattgcgccagttccacaagagtaccgatttccaccccatcaatcagaggaagtgtactaatcccgcgcccgtcggtacaggttttgcacaatttcaccggtacattctgagcggtaaggatctccagcatttgctgaatgttgtagccttcccctggtttttgcccgcgcaacccggctgtgaccgcatcagacatgaggaacagacgcagatccagattgctctcctgctctcgtaacgcaatggccagccgcaagctgttaaacaaggattcgctcccgtaaggtgcgccattggcaacgatcacgattttttgcattatttactcctgtattcagggaattagacactcatcttctatcttactgcttctgcagcgtctgaccaatcggtcacatttttaaggattttcctgaaagcgcgagaaaatacgacaaaagttgccagtaatcgttattctttaaggctatggtttttcattattaccggaagttaccgacgttttgagccgtttcgttcctcgcattatcccgttttatttactcttgcttgtagcaggcggtacagctaacgcacaatctaccttcgagcaaaaagcggcaaatccctttgataataacaatgatggtctgccggatttaggcatggctcccgaaaatcatgatggggaaaaacactttgctgaaattgtgaaagatttcggcgaaaccagtatgaatgataacgggctggatactggcgagcaggcaaaagctttcgcattgggaaaagtccgcgacgcgcttagtcaacaggttaatcagcacgtagagtcctggctatcaccgtggggaaatgccagtgttgacgtcaaagtggataacgaaggacatttcaccggcagtcgtggaagctggtttgtgccgttacaagataatgatcgttatctcacctggagccagcttggtcttactcagcaggataatgggttggtgagcaatgtgggcgttgggcaacgctgggcgcgcggcaactggctggtgggttataacactttttatgacaacttgctggacgaaaatcttcagcgagcgggctttggtgccgaagcgtggggcgaatatttgcgattatcggcaaacttttatcagccgtttgctgcatggcatgaacagacagccacgcaggaacaacggatggcgcgcgggtacgacctgacagctcggatgcgcatgccgttctatcaacacctcaataccagtgtcagcctagaacagtattttggtgatcgtgttgatttgtttaactctggtacgggttatcacaatcccgtcgcgttgagtctgggattaaattacacccctgtgccattagtcactgtgacggcccagcataaacagggtgaaagtggcgaaaatcaaaataacctcgggctgaatcttaattaccgctttggtgtaccgctcaaaaaacaactttctgcgggcgaggttgccgaaagtcagtcgttacgtggtagtcgctatgacaatccgcagcgaaataatctaccgactcttgagtaccgacagcgaaaaacgttaacggtgtttctggcgacaccgccgtgggatctaaaacctggcgaaacagtgccgctgaaattacaaatccgcagtcgttacggtattcggcaactgatttggcagggcgatacgcagatattaagtttgacgccgggcgcacaagccaacagcgcggagggctggacgctgatcatgcctgactggcagaacggggaaggggcaagcaatcactggcgattgtctgtggtggtggaagataaccaggggcagcgtgtctcctccaatgagatcacgctaacgcttgtcgaaccgttcgatgcattgtcaaacgacgaactgcgctgggaaccgtaatcagaaaatgcgctcctgatgcacccataccgctgcttccacgcgagacttgagcttcattttcttcagcatgtgcttgacgtgcacttttactgtgctttcggtgatatccaggcggcgggcaatcatcttgttcggcaaaccctgggcaatcagcttgagaatatcgcgctcgcgtggggttaactggttaacatcgcgctcagtagtggcacggttagcgcgcaagctggcggccagaacaggcgttaatgcttcgcttaataccatttcgccagcagctgcctgatgcaatgctttcagcagatcttccggttccatatcttttaacagatagccatccgcgccgcgtttcagtgcggtgaccacatcttcttcatggttagagacgctgaataccacaatgcgccctgagagggacttttcgcgcagtttatccagcgtttccagaccgttcatgccgggcatattgagatctaacaggatcagatcgggatcaagagactccgccagttcaataccctgttcgccattactcgcttcgccaaccacggtgatatctggtgccatactgataagctgttttacgccagttcgcagcatcgggtgatcgtcaatcagcaggatagtagccggttcctgattactcatgggtatctccttggacgtctgtgaaagttttttcgggaataaaggtgaccaccacttcggtgccacctgattcacgacggcggacgcggcaatcgcctcgtaaactttgcgcacgatcgcgcattattatcatgccgtagtgattgctgcggatggcattttcaggcacgccgcagccgttatcctggacggtcagtttgacctgattatcgttttgcgccaccgtcaccacgacttcactcgcttgcgaatgtttgagggcgttacttaatgcctcacgggcaatttgcaacaagtggattgcctgatgcgaaggcaccaggcgaggcggcaattgataatccagcttcaccgggaagccaaatttggcgctgtactcttcgcaactcgcctccagcgccggacgtaatccaggctcggtgagctgcaagcggaatgtggtgagcaattcacgcaactgcgcccaggatgcattcagttcgttacggatctgacttaacagttcgcggctgctttctggcagcgcatcgccctgcatctgtaaacaactcacctgcatcttcatgcaagagagagattgggcaatagaatcatgcagttcgcgcgcaatggtggcacgctcttccatcacgatcaactgttgctgacgttcctgatggcgatccagcgccagcgtggcggtgagttgttcaaccagggtatccaccagttgttgttgatcatggctaagatgacgcccctgcggcagggtcgccagcaaaataccgtactgcgtatgagagtcagccagccgccacttcagggtcgtgccgcgatcaccaacgggtaatacgccgcgcgggcagagctggcagcctttatcatcacaagtcatatctggctggcaggtaaactcctgatgattctcttcatcatcagtgtcatacacccgcaattcgatatcacgtagcagggttaaattctgtaagccgttgagtacaggtgacaggcgttcacacagcggggcgcgggaatgcaaacggcggttagcctgccataaaaaagagaggatctgatttttatgctccagcccggcggttttctcctgaacccgctgctcaagtacggcataactttcggccagttctgcagacatattgttcaacgcagttccaagcatcgccatttcgttgcgcccgctgatgtttgcgcgttgggtaaaatcgcgatgactgacggcactcgccattgccagcagttgccgccacggttgtagcagtcgcgcccgcaaccagataatagtgaacaccagtaaaagtgccataaataccgccattacccgatggaccagtaccactgtctcgatgcgcatttccgtggtgcggtcaaaaccagataccagttgatcaagcccggcaacaaactggctgacatccgctgacaccgtttctcggttttgtgcacgcatcagcgcagggatcagttcattacgccagtaatcttgtaaaccctgtaattgcgccagttgtccgtctcgttctgctgctcgagtcaactcggcgctaaatgccgtttgttccatctctttaattaagggcttgtctttctcgcttaatggcactgccgccaacagacggtaactttgcatgcgcagcgatcccgctttgttgatcgcatgggcgctgccctgaacgccttgcaccagccagccagaaaccgccatccctgccagtccaatagcagtagaaagcaacacaataagcgcaacctgattaaccagggtgagcggagagagacaacgtttaagcatgtaaacctcttccttcaggctttaaatgagcaataaccttaatgaatgtgacgatacattctggaatggcagtattctcggctattggctgaagtatacccatacccggaaagagttactccttatttgccgtgtggttagtcgctttacatcggtaagggtagggattttacagcaccgtgaaaaatctcataatttttatgaagtcactgtactcactatgggtaatgataaatatcaatgatagataaagttatcttatcgtttgatttacatcaaattgcctttagctacagacactaaggtggcagacatcgaaacgagtatcagaggtgtctatgagtcactcatccgcccccgaaagggctactggagctgtcattacagattggcgaccggaagatcctgcgttctggcaacaacgcggtcaacgtattgccagccgcaacctgtggatttccgttccctgtctgctgctggcgttttgcgtatggatgttgttcagcgctgttgcggtgaacctaccgaaagtcggctttaattttacgaccgatcagctatttatgttgactgcgctgccttcggtttctggcgcgttattacgtgttccatactcctttatggttcctatcttcggtggtcgtcgctggacggcgttcagcaccggtattctgattattccttgcgtctggctgggttttgccgtgcaggatacctccacgccttatagcgtcttcatcatcatctctctgctatgcggctttgctggcgcgaacttcgcatccagtatggcaaacatcagcttcttctttccgaaacagaagcagggtggcgcgctgggtctgaatggtggtctgggaaacatgggcgtcagcgtcatgcagttggttgctccgctggtggtatcactgtcgattttcgcagtatttggtagccagggcgtcaaacagccggatgggactgagctgtatctggcgaatgcgtcctggatatgggtgccgttccttgccatcttcaccattgcggcgtggtttggcatgaacgatcttgctacctcgaaagcctccatcaaggagcagttgccggtactcaaacggggtcatctgtggattatgagcctgctgtatctggcaaccttcggctccttcatcggcttctccgcgggctttgcaatgctgtcaaaaacgcagttcccggatgttcagattctgcaatacgctttcttcgggccgtttattggtgcgctggcgcgttctgcaggtggtgcattatctgaccgtctgggcggaactcgtgtcacgctggtgaactttattctgatggcgattttcagcggcctgctgttcctgaccttaccgactgacgggcagggcggaagcttcatggcgttcttcgcggtcttcctggcgctgttcctgacagctgggctgggtagtggttccactttccagatgatttcagtgatcttccgtaaactgacaatggatcgcgtgaaagcagaagggggttctgacgaacgtgcgatgcgtgaagcggcaaccgacacggcggcggcgctgggtttcatctctgcgattggcgcgattggtggcttctttatcccgaaagcgtttggtagctcgctggcattaacgggttcgccagtcggcgcaatgaaggtatttttgattttctatatcgcctgcgtagtgattacctgggcggtatatggtcggcattctaaaaaataaaccgttactcgtcatacttcgggttacatgtgctgcggctgcgttcattcaccccagtcacttactttagtaagctcctgggattcattcacttgccgccttcctgtaaaccgaattatatagagtaaaatatttgattatcctttgcgcggcatgatgtcgcgctttttttatgcgtcatttagttacaacatactaatgttatatggtttatttcgccggatttcattaagagccattaatatgttacccatggggaatactccttaatacccatctgcataaaaatcttaatagtttaaataactacaggtataaaacgtcttaatttacagtctgttatgtggtggctgttaattatcctaaaggggtatcttaggaatttactttatttttcatccccatcactcttgatcgttatcaattcccacgctgtttcagagcgttaccttgcccttaaacattagcaatgtcgatttatcagagggccgacaggctcccacaggagaaaaccgatgagtaaattcctggaccggtttcgctacttcaaacagaagggtgaaacctttgccgatgggcatggccagcttctcaataccaaccgtgactgggaggatggatatcgccagcgttggcagcatgacaaaatcgtccgctctacccacggggtaaactgcaccggctcctgcagctggaaaatctacgtcaaaaacggtctggtcacctgggaaacccagcagactgactatccgcgtacccgtccggatctgccaaaccatgaacctcgcggctgcccgcgcggtgccagctactcctggtatctttacagtgccaaccgcctgaaatacccgatgatgcgcaaacgcctgatgaaaatgtggcgtgaagcgaaggcgctgcatagcgatccggttgaggcatgggcttctatcattgaagacgccgataaagcgaaaagctttaagcaggcgcgtggacgcggtggatttgttcgttcttcctggcaggaggtgaacgaactgatcgccgcatctaacgtttacaccatcaaaaactacggcccggaccgtgttgctggtttctcgccaattccggcaatgtcgatggtttcttacgcatcgggtgcacgctatctctcgctgattggcggtacttgcttaagcttctacgactggtactgcgacttgcctcctgcgtctccgcaaacctggggcgagcaaactgacgtaccggaatctgctgactggtacaactccagctacatcatcgcctgggggtcaaacgtgccgcagacgcgtaccccggatgctcacttctttactgaagtgcgttacaaagggaccaaaactgttgccgtcacaccagactacgctgaaatcgccaaactgtgcgatctgtggctggcaccgaaacagggcaccgatgcggcaatggcgctggcgatgggccacgtaatgctgcgtgaattccacctcgacaacccaagccagtatttcaccgactatgtgcgtcgctacaccgacatgccgatgctggtgatgctggaagaacgcgacggttactacgctgcaggtcgtatgctgcgcgctgctgatctggttgatgcgctgggccaggaaaacaatccggaatggaaaactgtcgcctttaataccaatggcgaaatggttgcgccgaacggttctattggcttccgctggggcgagaagggcaaatggaatcttgagcagcgcgacggcaaaactggcgaagaaaccgagctgcaactgagcctgctgggtagccaggatgagatcgctgaggtaggcttcccgtactttggtggcgacggcacggaacacttcaacaaagtggaactggaaaacgtgctgctgcacaaactgccggtgaaacgcctgcaactggctgatggcagcaccgccctggtgaccaccgtttatgatctgacgctggcaaactacggtctggaacgtggcctgaacgacgttaactgtgcaaccagctatgacgatgtgaaagcttataccccggcctgggccgagcagattaccggcgtttctcgcagccagattattcgcatcgcccgtgaatttgccgataacgctgataaaacgcacggtcgttcgatgattatcgtcggtgcggggctgaaccactggtatcacctcgatatgaactatcgtggtctgatcaacatgctgattttctgcggctgtgtcggtcagagcgggggcggctgggcgcactatgtaggtcaggaaaaactgcgtccgcaaaccggctggcagccgctggcgtttgcccttgactggcagcgtccggcgcgtcacatgaacagcacttcttatttctataaccactccagccagtggcgttatgaaaccgtcacggcggaagagttgctgtcaccgatggcggacaaatcccgctataccggacacttgatcgactttaacgtccgtgcggaacgcatgggctggctgccgtctgcaccgcagttaggcactaacccgctgactatcgctggcgaagcggaaaaagccgggatgaatccggtggactatacggtgaaatccctgaaagagggttccatccgttttgcggcagaacaaccagaaaacggtaaaaaccacccgcgcaacctgttcatctggcgttctaacctgctcggttcttccggtaaaggtcatgagtttatgctcaagtacctgctggggacggagcacggtatccagggtaaagatctggggcaacagggcggcgtgaagccggaagaagtggactggcaggacaatggtctggaaggcaagctggatctggtggttacgctggacttccgtctgtcgagcacctgtctctattccgacatcattttgccgacggcgacctggtacgaaaaagacgacatgaatacttcggatatgcatccgtttattcacccgctgtctgcggcggtcgatccggcctgggaagcgaaaagcgactgggaaatctacaaagccatcgcgaagaaattctccgaagtgtgcgtcggccatctgggtaaagaaaccgacatcgtcacgctgcctatccagcatgactctgccgctgaactggcgcagccgctggatgtgaaagactggaaaaaaggcgagtgcgacctgatcccaggtaaaaccgcgccacacattatggtcgtagagcgcgattatccggcgacttacgaacgctttacctctatcggcccgctgatggagaaaatcggtaatggcggtaaagggattgcctggaacacccagagcgagatggatctgctgcgtaagctcaactacaccaaagcggaaggtccggcgaaaggccagccgatgctgaacaccgcaattgatgcggcagagatgatcctgacactggcaccggaaaccaacggtcaggtagccgtgaaagcctgggctgccctgagcgaatttaccggtcgtgaccatacgcatctggcgctgaataaagaagacgagaagatccgcttccgcgatattcaggcacagccgcgcaaaattatctccagcccgacctggtctggtctggaagatgaacacgtttcttacaacgccggttacaccaacgttcacgagctgatcccatggcgtacgctctctggtcgtcagcaactgtatcaggatcaccagtggatgcgtgatttcggtgaaagcctgctggtttatcgtccgccgatcgacacccgttcggtgaaagaagtgataggccagaaatccaacggcaaccaggaaaaagcgctcaacttcctgacgccgcaccagaagtggggtatccactccacctacagcgacaacctgctgatgctgactttaggtcgcggtggtccggtggtctggttgagtgaagccgatgccaaagatctgggtatcgccgataacgactggattgaagtcttcaacagcaacggtgctctgactgcccgtgcggttgtcagccagcgtgttccggcagggatgaccatgatgtaccacgcgcaggaacgtatcgttaacctgcctggttcggaaattacccaacagcgtggtggtatccataactcggtcacccgtatcacgccgaaaccgacgcatatgatcggcggctatgcccatctggcatacggctttaactactatggcaccgtaggttctaaccgcgatgagtttgttgtagtgcgtaagatgaagaacattgactggttagatggcgaaggcaatgaccaggtacaggagagcgtaaaatgaaaattcgttcacaagtcggcatggtgctgaatctcgataagtgcatcggctgccacacctgttcagttacctgtaaaaacgtctggaccagccgtgaaggcgtggaatatgcgtggttcaacaacgtggaaaccaagccgggccagggcttcccgactgactgggaaaaccaggaaaaatacaaaggcggctggatccgtaaaatcaacggcaaactgcagccgcgcatgggtaaccgtgccatgctgctgggtaaaatcttcgctaacccgcatctgccggggatcgacgattattacgagccgttcgattttgactatcagaacctgcataccgcgccggaaggcagcaaatcgcagccgattgcccgtccgcgttcgctgattaccggggaacggatggcgaaaatcgaaaaagggccgaactgggaagatgacctgggcggtgagtttgacaaactggcgaaagacaagaacttcgacaacatccagaaggcgatgtatagccagttcgaaaacaccttcatgatgtatttgccgcgcctgtgcgaacactgcctgaacccggcatgtgtggcgacctgcccgagcggtgcgatttacaagcgtgaagaagatggcatcgtcctgatcgaccaggataaatgccgtggctggcgtatgtgcatcactggatgcccgtacaaaaaaatctacttcaactggaagagcggtaagtctgagaagtgcatcttctgctatccgcgtattgaagcgggtcagccgaccgtgtgctcagaaacctgtgtcggtcgtatccgttatcttggcgtgctgttgtacgatgccgacgctattgaacgtgcagccagcaccgagaacgagaaagatctttaccagcgtcagctggacgtgttcctcgatccgaacgatccgaaagtcatcgagcaggcgattaaagacggtattccgctgagcgttattgaagccgcacagcagtcgccggtttataaaatggcaatggaatggaaactggcgctgccgctgcatccggaatatcgcacactgccgatggtctggtacgtgccgcctctgtctccgattcagtctgcagcagacgcgggtgagctgggtagcaacggcattctgccagacgtcgaaagcctgcgtattccggtacagtatctggcgaatctgctgaccgccggtgataccaaaccggtactgcgcgcactgaaacgtatgctggcgatgcgtcattacaaacgtgctgaaaccgttgacggtaaagttgatacccgtgcgctggaagaggtcggtctgaccgaagcccaggcacaggagatgtaccgttatctggcgattgctaactacgaagatcgctttgtggtgccgagtagtcatcgtgaactggcacgggaagccttcccggagaaaaatggctgcggctttacctttggtgatggctgccacggttcagataccaaattcaatctgttcaacagccgtcgtatcgatgccatcgatgtgaccagcaaaacggagccgcatccatgatcgaactcgtgattgtatcgcgtctccttgaatatccggatgctgccttatggcagcatcaacaagagatgtttgaggcgattgccgcgtcgaaaaatctgccaaaagaggatgcccatgcgctgggcattttcctgcgcgatttaacgacgatggatccgctcgatgcccaggcgcagtacagcgaactgttcgaccgtggccgcgccacgtcactgttgctgtttgaacatgtgcacggcgaatcccgcgaccgcggccaggcgatggtggacctgctggcgcagtacgagcagcacggcttgcagttaaacagccgcgaattgccggaccatctgccgctgtatctggagtacctggcgcagctgccgcaaagcgaagccgtggaaggtttgaaagatatcgcgccgattctggcattgctgagcgcgcgtctgcaacagcgtgaaagccgttatgccgtgctgtttgatctgctgctgaaactggcgaataccgctatcgacagcgacaaagtggcggaaaaaattgccgacgaagcgcgcgatgatacgccgcaggcgctggatgctgtctgggaagaagagcaggttaaattctttgctgacaaaggctgcggtgattcagcaatcactgcgcatcagcgtcgctttgccggtgccgtcgcgccgcaatatctgaatatcaccaccggaggacagcactaatgcaattcctgaatatgttcttctttgatatctacccgtacatagccggggcggtcttcctgattggtagctggctgcgttatgactacgggcagtacacctggcgcgcggcgtccagccagatgctggatcgcaaagggatgaacctggcgtcgaacctgttccatatcgggattctggggatttttgtcggtcacttcttcggtatgctgacgccgcactggatgtatgaagcctggctgccgattgaagtgaaacagaaaatggcaatgtttgctggtggtgccagcggcgtgctgtgtctgattggcggcgtgctgttgctgaaacgtcgtctgttcagcccacgcgtgcgtgcaaccactaccggagcggatatcctgatcctgtcgctgctcgttatccagtgcgcgctgggcctgttgaccattccgttctccgctcagcatatggacggtagcgagatgatgaaactggttggctgggcgcagtcggtggtgaccttccacggtggcgcttctcaacacctcgatggtgtggcgtttatcttccgtctgcacctggtgctggggatgacgttattcctgctgttcccgttctcgcgtctgatacacatctggagcgtaccggtggagtatctgacacgtaagtaccagctggtgcgcgctcgtcactaagcgaattttagttcacatagaccctgcttcggcggggtttttttatgggcacggtgcggggtgagttgtcggatgcgcttcgcttatccgacctacaggggaggatattgtaggcccggtaaacgtggtgccatcgggcaaaattagctcggagtaacaggttttgattatttaaggaagcgatggtggtgggggaaggattactcagcgctgcgcgcttcgcccttcgggtcgttgcctgcggcaacgctctctcgctggcgctcaagtcgaaccttggtcgaagcttctcatccttccccgcttgggcagaatatttgattgcggattcgtttgagaattccggggcttttgaaagtgatggtggtgggggaaggattactcagcgctgcgcgcttcgcccttcgggtcgttgcctgcggcaacgctctctcgctgacgctcgagccgaaccttagtcgaagcttctcatccttccccgcatgggcagaatatttgattgcggattcgcttgagagttcagggacttttgaaagtgatggtggtgggggaaggattactcagcgctgcgcgcttcgcccttcgggtcgttgcctgcggcaacgctctctcgctggcgctcgagtcgaaccttggtcgaagcttctcatccttccccgcatgggcagaatatttaattgcggattcgttgggaagttcagggacttttgaaagtgatggtggtgggggaaggattcgaaccttcgaagtcgatgacggcagatttacagtctgctccctttggccgctcgggaaccccaccaggggtaattcaaattttgaggtaatgcttgagatggtggtgggggaaggattattcgtcgcttcgctcctcacccttcgggccgttgcctgtggcaacgttctctcgctttcgctcgaatcgaaccttagtcgaaggttctcacccttccccgatgagtgcaaactttcacaatctcaccgaagttaccacatcgctgtggtgaattatggtggtgggggaaggattcgaaccttcgaagtcgatgacggcagatttacagtctgctccctttggccgctcgggaaccccaccacggggtaatgctttttactggcctgctcccttatcgggaagcggggcgcatcatatcaaatgacgcgccgctgtaaagtgttacgttgagaaaaatgaactggttgcgtaattttcatccgtaacggattaaaggtaaccagttatttttgctggcgattaaagaataatcgttcgattaccgtaaacaaagacgcgctgtgccagtactttgtatagtgcacgacttaagacgtttttctcgacgtcacgacctgcgcgcatcatatcttcagctgtgtaggtatgatcgacatgaataacgtcctgcatgatgattgggccttcgtccagattgtcattcacatagtgagcggttgcgccaataatcttcacaccacgttcataggcctggtgataaggacgtgcgccaataaacgctggcaggaatgaatggtgaatattgatgatcttattcgggaagcgtgccacaaattccggcgttaatacccgcatatacttcgccagcaccacgtagtcaggttgataagcatcaatggcatccgccatcttttgatcgtgctcgttgcgggttaacccttcatggcttaccagctcaaacggaatatcaaaacgctcaaccagagaacgtaaagtatcgtggttaccaataactgccgcgatttcgacatccaggccgccgtaattggctttcatcaacaaatcgccaaggcaatgcgcttctttagtgaccagaatcactatccggcgacgaccggcaggattcagctcacgcacggagccttctggcaatgcgctatcgagatccgccagcagggtggaatcattaaaaatcccttccagttccgtgcgcataaaaaagcgcccggtacggtgatcaacaaattcattgttctgtacgatatttaactcgtgcttgtagcaaatattggtaatacgtgcgatcagacctttttggtccggacaaatagtacgcagaactttacgttggagtgaatgcattgctggaaaaaccttgttgagagtgtttgctaaaccgtaccgtcaaccattattggccgcagcactttttaaattttttacctgaaccacaagggcagggatcgttgcgaccaaactgcggacgtgtaccgtcaatatagtaccattgaccgttttctttcaaaaatcgcgaacgttcaattattgcacctgttttaccaccttcggtaaatcgagcaacaaaactgacaaatccgatattgtcggcgtcctgccaacaatgttcaaatacggtcaatcccaaccattcagtatgcgcaaatccggccatcaattcggcacgtaacgccgctgctccacaagagggatgccaggtctttattaaataatctgcgtcttgcatcacaaaagcgcagtaacgcgaacgcatgagatgttctggatcaggtgcaaccttttcaccagacacataagggtggcaacataggctatactcgacagcactaccacagggacaaagctgagacacaaataatctccctggaaacaataacggcgtattaaccgcctgagtagcactatgttaaccgagcagtagcgatgtggctacgattgcattccaggggaatcttgcgggaataatgagaaagataaaaatagggctggcgctgggatctggcgcggcgagaggttggtcgcatattggcgttattaatgcgctaaaaaaagtgggtattgaaattgatatcgttgcaggatgttcaattggttcgctggtgggcgctgcctatgcatgcgatcgattatctgcgctggaagattgggtgacctctttcagttattgggatgttttacgcctgatggatctctcctggcagcgcggtgggttactgcgcggcgagcgtgtcttcaatcaataccgcgaaataatgccggaaacagagatcgaaaattgttcccgtcgctttgcggctgttgccaccaatttaagtacgggacgtgaattatggtttactgaaggcgatctccatcttgctattcgcgcatcatgcagtattccaggactcatggcacctgttgcacataacggctactggctggttgatggagcagtcgttaacccaattcctatttccctcacgcgtgcattgggggctgatattgtgatagcggttgacctgcagcacgatgctcatttgatgcaacaagatttgctctcctttaatgtcagtgaagaaaatagcgagaatggtgattctctgccgtggcatgcgcgtctgaaagaaaggttaggcagcataacgacacgtcgggcggtgacagcgccaacggcaacagagattatgaccacttctatccaggtgctggagaaccgccttaaaaggaaccgcatggcaggtgatccgcccgatattctgattcaacctgtttgcccgcaaatatctacgcttgatttccatcgcgcgcacgctgccattgcggccggacagctggcagtggaaaggaaaatggacgaacttttgccgttggtacgcaccaacatttgaccagaatttttatctacacttaagttaattctgacaggcgcaggtggcaatagcatgccactattgagtaaagccagtcaggggagagaacatgacgcagccattggtcggaaaacagattctcattgttgaagatgagcaggtatttcgctcgcttctggattcatggttttcctcattgggagcgacaacggtactggcggctgatggggtggatgcccttgagttgctgggaggtttcactccagacctgatgatatgtgatatcgcgatgccacgaatgaacgggcttaaactgctggagcatatacgtaacagaggcgaccagaccccagttctggtgatatctgccactgaaaatatggcagatattgccaaagcgttacgtctgggcgttgaagatgttttgctgaaaccagttaaagatctgaatcgcttgcgcgagatggtttttgcctgtctctatcccagcatgtttaattcgcgcgttgaggaagaggaaaggctttttcgcgactgggatgcaatggttgataaccctgccgcagcggcgaaattattacaggaactacaaccgccggttcagcaggtgatttcccattgccgggttaattatcgtcaattggttgccgcggacaaacccggcctggtgcttgatattgccgcactttcggaaaacgatctggcattttattgccttgatgtcacccgagctggacataatggcgtacttgctgccttgttattacgcgcattgtttaacggattattacaggaacagcttgcacaccaaaatcaacggttgccagagttgggcgcgttattgaagcaggtaaaccatttacttcgtcaggccaatctgccggggcagtttccgctattagttggctattatcatcgcgaactgaaaaatctcattctggtttctgcgggtctgaatgcgacgttaaataccggcgaacaccaggtgcaaatcagtaatggtgttccgttaggcactttaggtaacgcttatttgaatcaattgagccagcgatgcgatgcctggcaatgccaaatatggggaaccggtggtcgactgcgcttgatgttgtctgcagaatgagcaaacgataacgcgggctaaatttgcattacctgctaatgtcggctggtggtactatcgtcgccattcgtataagtaattgtcttaattatgctaactcgcctccttttcagaacttagccccttcggggtgctgatatactgggatgcgatacagaaatatgaacacgttcaaaacacgaacagtccaggagaatttaaatggctgccattaatacgaaagtcaaaaaagccgttatccccgttgcgggattaggaaccaggatgttgccggcgacgaaagccatcccgaaagagatgctgccacttgtcgataagccattaattcaatacgtcgtgaatgaatgtattgcggctggcattactgaaattgtgctggttacacactcatctaaaaactctattgaaaaccactttgataccagttttgaactggaagcaatgctggaaaaacgtgtaaaacgtcaactgcttgatgaagtgcagtctatttgtccaccgcacgtgactattatgcaagttcgtcagggtctggcgaaaggcctgggacacgcggtattgtgtgctcacccggtagtgggtgatgaaccggtagctgttattttgcctgatgttattctggatgaatatgaatccgatttgtcacaggataacctggcagagatgatccgccgctttgatgaaacgggtcatagccagatcatggttgaaccggttgctgatgtgaccgcatatggcgttgtggattgcaaaggcgttgaattagcgccgggtgaaagcgtaccgatggttggtgtggtagaaaaaccgaaagcggatgttgcgccgtctaatctcgctattgtgggtcgttacgtacttagcgcggatatttggccgttgctggcaaaaacccctccgggagctggtgatgaaattcagctcaccgacgcaattgatatgctgatcgaaaaagaaacggtggaagcctatcatatgaaagggaagagccatgactgcggtaataaattaggttacatgcaggccttcgttgaatacggtattcgtcataacacccttggcacggaatttaaagcctggcttgaagaagagatgggcattaagaagtaacatccgtatcggtgttatccacgaaacggcgttgagcaatcgacgccgtttttttatagcttattcttattaaattgtcttaaaccggacaataaaaaatcccgccgctggcgggattttaagcaagtgcaatctacaaaagattattgcttgatcaggaaatcgtcgagggatttaccttgctcatccattgcttttttgattacagctggagtacggccttggccagtccaggttttagtttcgccgttttcgtcaacgtagctatattttgccggacgctgagcacgtttagctttggtgccagatttaacggcagcaaggctattcagcagttcgttcgggtcaataccgtcagcgatcagcatttcgcgatattgctgcagtttacgagtgcgctcttcaacttcagcagcagccgcgctttcttcttcgcgacgttcgttaacaacaacttctaatttttccagcatttcttccagcgtttcaagtgtacattctcttgcctgcgcacgaagagtacggatgttgttcagaattttaagtgcttcgctcattgtagtaatctcaaacttatattggggtggtttgttgaggtaataatagagccttaaattcagttgtgcaatagccaggaatgtaaggaattcaaaattgttctttattttgtgccgccaataaatatcttttcataaaattagccagaaaagacgcggcatatagccctatttacaccgatgatttcgcagcacgtgaggttaaaacttcctgattcatgtcacattttatggggagattatcgtaggctgacgacctttcagtcttctgtattagttgtgtttacgagaattccctattaagcgaatgatgaaaagtagaacagtcgcaataagagcatggacttagtattgcactatctcctggaggtcaacagagggctattacttgcgcaacaggttaaagattgtgaatagttaccagcagtcatttacccgcttataacaagcgaggcagttgtaatgatagctcagaaggattatgcaaggcttcgtaagggagaacgcatatacccacttctgtgcatactgttgagctgaaaaactgacgaattatgataaactccagccaactttatttcatatcattgagggcctgtggctgatggcacagctatatttctactattccgcaatgaatgcgggtaagtctacagcattgttgcaatcttcatacaattaccaggaacgcggcatgcgcactgtcgtatatacggcagaaattgatgatcgctttggtgccgggaaagtcagttcgcgtataggtttgtcatcgcctgcaaaattatttaaccaaaattcatcattatttgatgagattcgtgcggaacatgaacagcaggcaattcattgcgtactggttgatgaatgccagtttttaaccagacaacaagtatatgaattatcggaggttgtcgatcaactcgatatacccgtactttgttatggtttacgtaccgattttcgaggtgaattatttattggcagccaatacttactggcatggtccgacaaactggttgaattaaaaaccatctgtttttgtggccgtaaagcaagcatggtgctgcgtcttgatcaagcaggcagaccttataacgaaggtgagcaggtggtaattggtggtaatgaacgatacgtttctgtatgccgtaaacactataaagaggcgttacaagtcgactcattaacggctattcaggaaaggcatcgccacgattaataagaatttctttactgacagggtgagcagggcacttttatcctgtcagttcgttttacgcacttcttccgggctatatacccttctcggcagttttttaacgccgctatacgcctcacagggctcttaagcaccgacgttgacttgtgacctgtaaagtacaatatccctgtgtttaggcgttatacatcgtcgcaaatatgatgaaggctaatgctgtcggtttatggaaaagttgctttgggtaaacaaaaaatacggccccagaagggcaatgccgttcacttaagaggagcggcactatgtttcacaggataacgggtttttgatatcttaaccgacctcggccttgatggtcgggggcgttttgttatgaacaccacttccagagcaccccgaagatgctccagtcgtttcgggatggtccctggtgacgccgtgtttcccagctctatcatttctgatgcgatattcttccacgcaggcagtagccagtggcggttacaacccttctggttcagcgtcagcagcaggtcttcgctgtaaaaaagtttatcaaacaacgtaatagagttatccgggatggtggcgagcatggagtgggccagcacagtttcgctctgccggtaaggtgcggtcacggcattcagcagaatgtgacttcccaggttcattaaggccaccagacgcataaccgggtaggcgttctgccgcttagtggatgtgttggcagacccataatattcacgcagctcgggtttatcaggtgtcctgaactgtgcgccatcaatggcaaaaagttgcaggccgtgccagtcatccttcaggtaacgttccgcgcccctgtctgtgcggtctggcggaagagccattccactggggcggcccccacgcgctgacgcgcctgggtgacagcgctgcgggccagcaggttcatccccgcttcgccatccgcgctcaggttcagacggcgaacaacatcggtaattggctcattgcaccaccatccagataaccatgtcccccggtaaacgacggcggcgaacggtcgcatgagcagaaagcgtcaggcagtgttgtatccactcggtgggaaggtgttctgcaaatagttgtgcagagggcggaggcataagcggatggtcactgaaatcgagcagatcattgagaagtggcataagaaaacggctccctgttgtggaagccgttatagtgcctcagtttaaggatcggtcaactaatccttaactgatcggcattgcccagaaggggccgtttatgttgccagacagcgctactgattaagcggattttttcgcttttttctcagctttagccggagcagcttctttcttcgctgcagtttcaccttctacataatcacgaccgtagtaggtatccagcagaatctgtttcagctcggagatcagcgggtaacgcgggttagcgccggtgcactggtcatcgaatgcatcttcagacagtttatccacgttcgccaggaagtctgcttcctgaacgccagcttcacggatagatttcggaatacccagttcagctttcagcgtttccagccatgccagcagtttctcgatcttagcagcagtacggtcgcccggtgcgctcagacccaagtggtcggcaatttcagcataacgacggcgagcctgcggacggtcatactggctgaatgcagtctgcttggtcgggttgtcgttcgcattgtagcgaataacgttacaaatcagcagggcgtttgccagaccgtgcggaatatggaactgggaacccagtttgtgcgccattgagtgacatacacccaggaaggcgttcgcaaacgcgatacccgcgatagtcgctgcactgtgaacacgttcacgcgctaccggatttttagacccttcgtggtaggacgctggcagatattctttcagcagtttcagtgcctgcagagcctgaccatcagagaactcagatgccagtacagaaacataagcttccatggcgtgagttactgcgtccagaccaccgaaagcacacagggacttcggcatgtccataaccaggttggcgtcgacaatcgccatatccggagtcagcgcatagtctgccagcggatatttctgaccagtagcgtcgtcagttacaaccgcaaacggagtgacttcagaacctgtaccagaagtggtggtgacagcgatcattttcgctttcacgcccattttcgggaacttgtagatacgtttacggatatccataaagcgcagcgccagctcttcgaagtgagtttccggatgttcgtacataacccacatgatcttcgcggcgtccatcggggaaccaccacccagcgcgataatcacgtctggtttgaaggagtttgccagttctgcacctttacgaacgatgctcagggtcgggtccgcttctacttcgaagaagacttcagtttcaacgcctgctgctttcagtacggaagtgatctgatcagcataaccattgttgaacaggaagcggtcagtcacgatgagcgcacgtttgtggccatcagtaatcacttcatccagcgcgattggcagggagccacggcggaagtagatagatttcggaagtttgtgccacaacatgttttcagctcgcttagcaacggttttcttgttgatcaggtgtttcggaccaacgttttcagagatggagttaccaccccaagaaccacaacccagagtcagggaaggtgcgagtttgaagttatacaggtcaccgataccaccctgagacgctggggtgttaatcaggatacgcgccgttttcattttctgaccgaagtaagaaacgcgagccggttggttatcctggtcagtgtacaggcaagaggtatgaccgataccgcccatagcaaccagtttctctgctttttctaccgcgtcttcgaaatctttagcgcggtacattgccagagtcggggacagtttttcatgtgcgaacggttcgctttcatcaacaacggtcacttcaccgatcagaatcttggtgttttctggtacagagaagcctgccagttcagcaattttataggctggctgaccaacgatagccgcgttcagcgcaccgtttttcaggataacatcctgaacagctttcagctctttaccctgcaacagatagccgccgtgggttgcaaaacgttcacgtacagcgtcataaacagagtcaacaacaacaacagactgttcagaagcacagattacgccgttgtcgaaggttttggacatcagtacagatgcaactgcacgtttgatatcagcagtttcatcgataacaactggagtgttgcccgcgcctacaccgatagctggtttaccggagctgtatgcggctttaaccatgcccggaccaccagtcgcgaggatcaggttgatgtctgggtggtgcatcagtgcgttagacagttcaacagaaggttgatcgatccagccgatcagatctttcggagcaccggcagcgatagcagcctgcagaacgatatcagccgctttgttggtggcatcttttgcacgcgggtgcggggagaagataatggcgttacgggtcttcagactgatcagcgatttgaagatagcagttgaagtcgggttagtggtcggaacgataccgcaaataataccgattggttcagcgatagtgatggtaccaaaagtgtcgtcttcagacagaacaccacaggttttttcatctttataggcgttgtagatatattcagaagcaaagtggtttttgatcactttatcttcgacgatacccatgccggattcggcaacggccattttcgcgagtgggattcgagcatctgcagcagccagagcggcggcgcggaagattttgtctacttgctcttgagtgaaactggcatattcacgctgggctttttttacacgctctacgagtgcgttaagttcagcgacattagtaacagccataatgctctcctgataatgttaaacttttttagtaaatcatctgctcgaatacgagagtatagtcagtgcggtgatgatttgcttaacctatgaaaatcaaaagcttactcgcgctcacactcactgtgatttactaaaagagtttaaacattagagttattatctctaatgcgtcacttccaggtggcgtaagcaagattactcacttctgggtactgattacgtgatccaaatcaaatttttgcaaagctgacacctttcagcatcgcttttcgccattatagctaacagttaataaattgtagtatgatttggtggctacattagcatgttttgcacaactagataacaataacgaatgatagcaattttaagtagttaggaggtgaaaaatgctgtcaaaaggcgtattgtcagcgcgtcttttcaaccttatttatggctaacattatccggcttttgcttcggagctaaccgtgattcagaccttttttgattttcccgtttacttcaaatttttcatcgggttatttgcgctggtcaacccggtagggattattcccgtctttatcagcatgaccagttatcagacagcggcagcgcgaaacaaaactaaccttacagccaacctgtctgtggccattatcttgtggatctcgctttttctcggcgacacgattctacaactttttggtatatcaattgattcgttccgtatcgccgggggtatcctggtggtgacaatagcgatgtcgatgatcagcggcaagcttggcgaggataaacagaacaagcaagaaaaatcagaaaccgcggtacgtgaaagcattggtgtggtgccactggcgttgccgttgatggcggggccaggggcgatcagttctaccatcgtctggggtacgcgttatcacagcattagctatctgtttggtttctttgtggctattgcattgttcgctttatgttgttggggattgttccgcatggcaccgtggctggtacgggttttacgccagaccggcatcaacgtgattacgcgtattatggggctattgctgatggcattggggattgaatttatcgttactggtattaaggggattttccccggcctgcttaattaattcctttcaaatgaaacggagctgccatgctccgtttacttcgtcattatttttactttgttcccgcgcagttatcaaaagcaaaaggaataggtaaaaatattcttctcaaattacagttagttataaggatttccttaactgcttctcctcaccatcatgttattttcgccacatcataatcctgggcttgctgaagaataattgaaatgatattagactggccccctgaatctccagacaaccaatatcacttaaataagtgatagtcttaatactagtttttagactagtcattggagaacagatgattgatgtcttagggccggagaaacgcagacggcgtaccacacaggaaaagatcgcaattgttcagcagagctttgaaccggggatgacggtctccctcgttgcccggcaacatggtgtagcagccagccagttatttctctggcgtaagcaataccaggaaggaagtcttactgctgtcgccgccggagaacaggttgttcctgcctctgaacttgctgccgccatgaagcagattaaagaactccagcgcctgctcggcaagaaaacgatggaaaatgaactcctcaaagaagccgttgaatatggacgggcaaaaaagtggatagcgcacgcgcccttattgcccggggatggggagtaagcttagtcagccgttgtctccgggtgtcgcgtgcgcagttgcacgtcattctcagacgaaccgatgactggatggatggccgccgcagtcgtcacactgatgatacggatgtgcttctccgtatacaccatgttatcggagagctgccaacgtatggttatcgtcgggtatgggcgctgcttcgcagacaggcagaacttgatggtatgcctgcgatcaatgccaaacgtgtttaccggatcatgcgccagaatgcgctgttgcttgagcgaaaacctgctgtaccgccatcgaaacgggcacatacaggcagagtggccgtgaaagaaagcaatcagcgatggtgctctgacgggttcgagttctgctgtgataacggagagagactgcgtgtcacgttcgcgctggactgctgtgatcgtgaggcactgcactgggcggtcactaccggcggcttcaacagtgaaacagtacaggacgtcatgctgggagcggtggaacgccgcttcggcaacgatcttccgtcgtctccagtggagtggctgacggataatggttcatgctaccgggctaatgaaacacgccagttcgcccggatgttgggacttgaaccgaagaacacggcggtgcggagtccggagagtaacggaatagcagagagcttcgtgaaaacgataaagcgtgactacatcagtatcatgcccaaaccagacgggttaacggcagcaaagaaccttgcagaggcgttcgagcattataacgaatggcatccgcatagtgcgctgggttatcgctcgccacgggaatatctgcggcagcgggcttgtaatgggttaagtgataacagatgtctggaaatataggggcaaatccagatattattaattccactgcctttggtagaggaaagtgctaaataataatcaattgttaaattattgtgcatttcactactggaactgtaatcagaaaagatagacatgcttagccaatctctatttgattgaattgaaagatgtttgttaaggcatggatgcaagctatagattctgatacggtcaataaaagagaattgcttaacaattttgcaaaatgtattggcgagtaagaaccgcatttggtactttccgggcaaccgccagacgattctttattggtaatgagaataattaacaattaaagagcgtcgcgaaagaataatgtgtctcgacaggggagacacagtacgaatcgacataaggtgatcgtctgaatcaccagaataaataaagtcggtgatagtaatacgtaacgataaagtaacctgacagcagaaagtctccgagcctgtgcagggtcccaatccgggattacacatgctggttaataccagtaattataatgagggagtccaaaaaacaatgaccaacatcaccaagagaagtttagtagcagctggcgttctggctgcgctaatggcagggaatgtcgcgctggcagctgatgtacccgcaggcgtcacactggcggaaaaacaaacactggtacgtaacaatggttcagaagttcagtcattagatccgcacaaaattgaaggtgttccggagtctaatatcagccgagacctgtttgaaggcttactggtcagcgatcttgacggtcatccagcacctggcgtcgctgaatcctgggataataaagacgcgaaagtctggaccttccatttgcgtaaagatgcgaaatggtctgatggcacgccagtcacagcacaagactttgtgtatagctggcaacgttctgttgatccgaacactgcttctccgtatgccagttatctgcaatatgggcatatcgccggtattgatgaaattcttgaagggaaaaaaccgattaccgatctcggcgtgaaagctattgatgatcacacattagaagtcaccttaagtgaacccgttccgtacttctataaattacttgttcacccatcaacttcaccggtgccaaaagccgctatcgagaaattcggcgaaaaatggacccagcctggtaatatcgtcaccaacggtgcctataccttaaaagattgggtcgtaaacgaacgaatcgttcttgaacgcagcccgacctactggaacaacgcgaaaaccgttattaaccaggtaacctatttgcctattgcttctgaagttaccgatgtcaaccgctaccgtagtggtgaaatcgacatgacgaataacagcatgccgatcgaattgttccagaagctgaaaaaagagatcccggacgaagttcacgttgatccatacctgtgcacttactattacgaaattaacaaccagaaaccgccattcaacgatgtgcgtgtgcgtaccgcactgaaactaggtatggaccgcgatatcattgttaataaagtgaaagcgcagggcaacatgcccgcctatggttacactccaccgtatactgatggcgcaaaattgactcagccagaatggtttggctggagccaggaaaaacgtaacgaagaagcgaaaaaactgctggctgaagcgggttataccgcagacaaaccgttgaccatcaacctgttgtataacacctccgatctgcataaaaagctggcgattgctgcctcttcattgtggaagaaaaacattggtgtaaacgtcaaactggttaaccaggagtggaaaacgttcctcgacacccgtcaccagggtacttttgatgtggcccgtgcaggctggtgtgctgactacaacgaaccaacttccttcctgaacaccatgctttcgaacagctcgatgaataccgcgcattataagagcccggcctttgacagcattatggcggaaacgctgaaagtgactgacgaggcgcagcgcacagctctgtacactaaagcagaacaacagctggataaggattcggccattgttcctgtttattactacgtgaatgcgcgtctggtgaaaccgtgggttggtggctataccggcaaagatccgctggataatacctatacccggaatatgtacattgtgaagcactaatggcaatacgtggggcaggagtgtcctgctccacggtgtctgatttttatcgcattacagaaggcacaggccagaaggtagggcaatgttaaaatttattctacgtcgctgtctggaagcgattccgacgctatttattcttattactatttcgttctttatgatgcgcctcgcgccgggaagcccttttaccggcgaacgtactttaccgccagaagtgatggccaatatcgaagcgaaatatcatcttaatgatccgatcatgacacagtatttcagctacctgaaacaactggcgcacggtgatttcggtccatcgtttaaatataaagattattcggtcaatgacttggttgcatccagttttcccgtttctgccaaactgggagccgcagcatttttccttgcggtaatactgggtgttagtgctggcgttattgccgcattaaaacaaaacaccaaatgggactataccgtgatggggctggcaatgaccggggttgttatccccagttttgtggttgcaccattattagtcatgatatttgcgatcattttgcattggctgccgggcggtggctggaatggtggggcgcttaaattcatgatattgccgatggtggcgttgtcactcgcttatatcgccagtattgcgcgtattacccgtggctctatgattgaagtattacactccaattttattcgtactgcccgggcgaaagggttacctatgcggcggatcattttacgtcacgcattaaaacctgctctgttacccgtgctctcttatatgggccccgcatttgtcggcattattaccggttctatggttatcgaaaccatttatggtttgccggggattggacaactgttcgttaatggcgcattgaaccgtgactattccttagtgttaagcctgaccatcctggttggtgctttaaccattttgtttaatgccattgtcgatgtgctatatgcggttatcgacccgaaaatccgttactgatactggagctcgcgatgatgttaagtaagaaaaacagcgagacgctggaaaatttcagtgaaaagctggaggtcgaagggcgcagcttgtggcaggacgcacgtcgacgttttatgcataaccgtgcggcggttgccagtctgatagtgctggtgctgatcgcgttatttgtaatcctggcaccgatgctttcccagtttgcctatgacgatactgactgggcgatgatgtccagcgccccggatatggagtccggtcactactttggtactgactcatccggtcgcgacctgcttgtgcgcgttgcgattggcgggcgtatctcactcatggtcggtgttgctgcggcactggtggctgtggtcgtcgggacactttatggttcgctttccggttatctgggcggtaaagtggattcggtaatgatgcgtctgctggaaatcctcaactccttcccattcatgttcttcgtcattttgctggtgacctttttcggtcaaaacatcctgctgattttcgtggcgataggcatggtttcctggctggatatggctcgtattgtgcgtgggcaaaccctgagtctgaagcgcaaagagtttattgaggcggcacaagttggcggtgtatcgacatcgggcattgttattcgccacattgtgccgaatgtactcggtgtggtggtggtctacgcatcacttctggtgcccagcatgatcctctttgaatctttccttagcttcctggggttgggtacgcaagagccgttaagcagctggggtgcattgctgagtgatggcgcgaactcgatggaagtctctccatggttattgttgttcccagcgggattcctcgtggtgacgctgttttgtttcaactttatcggcgatggcttgcgtgatgccctcgacccgaaagatcgttaaggagtgcagccatgagcgtaattgaaactgcaactgtgccgctcgcacaacaacaggctgacgcactgctgaacgtgaaagatttgcgtgtcacctttagtaccccggacggcgacgtcacggcggtcaatgatttgaatttttccctacgtgccggagaaacgctgggtattgtaggtgagtctggttcgggtaaatcgcaaactgcatttgcgttgatgggcctgttggctgccaacggacgtattggcggatcggcaaccttcaatgggcgtgaaatcctcaatttgccagagcatgaactcaataaactgcgcgctgaacaaatctcaatgatttttcaggacccaatgacttcgttgaatccctatatgcgcgtcggtgagcagttgatggaagtgctgatgctgcataagaacatgagcaaagctgaggcgtttgaagagtcggtgcggatgctcgatgcggtaaaaatgccggaagcgcgtaaacgcatgaaaatgtacccgcacgaattttctggcggcatgcgtcagcgagtcatgattgcgatggccttgttatgtcgacctaagctgctgattgcggatgaaccaacaactgcgctggacgtcaccgtacaggcgcagatcatgacgctattaaatgaactgaagcgggaatttaataccgccatcattatgatcacccacgatcttgtcgtggtggcggggatctgcgacaaagtgctggtaatgtacgccgggcgcacgatggaatatggcaacgcgcgcgatgtcttttatcaacccgttcatccttattctatcggtttgctcaacgcggtgccgcgtctcgatgcggaaggtgaaacaatgttgaccatcccgggtaatccgccaaacctgctgcgattaccgaaaggttgcccgttccagccacgttgtccgcatgcgatggaaatttgtagtagcgcaccgccgctggaagagtttacgcctggccgtctgcgtgcttgctttaaaccggtggaggaactgttatgaatgctgtaactgaaggaagaaaagtcctccttgaaatcgccgatcttaaagtgcactttgaaatcaaagatggcaaacagtggttctggcaaccgccgaaaacgctcaaagccgtcgatggtgtcactcttcgcctgtatgaaggggaaacattaggtgtggtaggggaatcgggatgcggtaagtccacctttgctcgcgccatcatcggtttggtcaaggcgaccgacggtcatgttgcctggttaggtaaagagttgctgggcatgaaacccgatgaatggcgtgccgttcgcagtgatattcagatgattttccaggatccgttggcatcgctaaacccgcgtatgaccatcggcgagatcatcgctgaaccactgcgtacttatcatccgaaaatgtcacgccaggaagttcgcgagcgcgtgaaggcgatgatgctgaaagtcgggttattgcctaacctgattaaccgctatccgcatgagttctctggtgggcagtgccagcgtatcgggattgcgcgtgctcttattcttgaaccgaagctgattatctgtgatgagccggtgtcggcgctggacgtgtcaattcaggcacaggtggtcaacctgctccagcaattgcaacgtgagatgggattgtcattaatttttatcgctcatgacctggccgtggtaaaacacatttccgatcgtgtgttggtgatgtatctcggccatgcggtagaactggggacctatgatgaggtctaccacaatccactacatccttacaccagggcattgatgtcggcagtccccatacctgatccggatctggagaagaacaaaaccatccagttactggaaggggaattaccgtcgccgatcaacccgccttccggttgtgttttccgtacccgttgcccgattgccggtccagagtgcgccaaaacacgtcctgttctggaggggagtttcagacactccgtttcttgcctgaaagtcgatccgctttaaaaacaataagggctgacagttgtcagccctttttcacgctaaaagcgattatttattcccgccagatgatatggcaaagtttgtgatctttttcgcggcataacagaatgcgggcaaaaacatcgttgatttcaccatcttcactgtccgccagaccaatcaccacttcggcaaaaaagtccgggttcaaatcgaaatcaacatgttcctgccagtcttccgccggatcgaataactccgcgccgccgcgctcttcaaactgaagattgaacagcagaacatcagctggatcgagattgtcggcagccagttcgagaaaaatatcgtaggcctgttcaagcgtttcatcttcagtcaggcgattgtttagatccatatccatagttactacctgtttaacctctgttggcgacgttttacagcaacggactgaagaagtaaaacagtcgctcggcgacacgttgccataatggacgttttagccataaacgggcatcgagcagacgtgaacgcgaaatataatcgtcctgaacggcggcgaggtcagcaccaaaacctttatcgtcgattgccagggtaatctcgaaatttagccacagactacgcatatcaaggttaactgtgccaaccagacttagttcgccatcgaccagcacgctcttggtatgcagtaacccgccttcaaactgataaattttaaccccagcagccagcagttccgtaaagaatgcgcgactggcccagccgaccagcatcgagtcattttttcgcggaaggataatactgacatccaccccgcgctgcgccgccgtgcaaatcgcatgaagtaaatcatcgcttggcacaaagtagggcgtggtcatgatcaaatattcacgcgccgaataagccgcagtcaataatgcctggtgaatgagatcttccggaaagccggggccagaagcaattgtgtgaatggtgtgaccgctggcctgttcaaacggcataatattgacatctggtggtggcggcagaatacgttttccggtttcaatctcccagtcgcaggaataaataatccccatcgcggtggcgatagggccttccatacgcgccatcagatcaatccattgccctacgcccgcatcttgtttgaagtagcgaggatcgaccatattcatgctgccggtgtacgcgatgtaattatcgatcatgatcatcttgcgatgttggcgcaggtccatacggcgtaaaaacacacgcatcagattgacctttaaggcttcgaccacttcaataccggcattacgcattagctcgggccacgggctgcggaaaaaagccacactcccggcggagtcgagcatcaatcggcaatgaatgccgcgtcgcgcagccgccattaatgattcagccacctggtccgccatgccgccgggctgccagatataaaacaccatctcaatattatggcgcgcgagctggatgtcgcggattaacgcctgcatcacatcatctgactcggtcatcagttgtagctgattccctttgaccccagcgatcccctgacgacgctcgcaaagcttgaataatggcgcagcgacactgctattttcttcggcgaagatatgcttacaggctttaaggtcgttaagccattttgcggtggaaggccacatcgctctggcgcgctcagcgcggcgtttgcctaaatggagctcgccaacggcaagataggcaataattccgactaacggcagaatgtaaataatcaacagccaggccatcgcggagggaactgcgcgtcgtttcattagaatgcgtaaagttacgcctgcaatgagcaaccagtatcccagaatggccaaccaactcaccaacgtataaacggttgtcatagattagaaatccttttgaaagcgcattgttatgagtttacgcatatggattcatctggcaaataaaaacgcgggaaaagcactggtcagcgtcgggggtgggggtataatgaccattctgttattgcatagagtagttaacatgaagcggagtagaacggaagtggggcgctggcgcatgcagcgtcaggctagccgacgtaaatcgcgttggcttgaggggcaatcgcgccgaaatatgcgtatccacagcatcaggaagtgcattctaaacaaacagcgtaactcgttattgtttgcgatctacaatatctaaatgtactgggcaccattgcggtgcccaataagtttactcttccgtctttaaactctatttttgcgccgattctttactgtcagctttcgtttctagttcatcgttatcgctgaaaataccatgacctgagttcaacaacattgaaacgagcatatcattattaatctcttcaccatttaaaactcgcgccagaatttcgctgccaaacagttgcggtgagagaatgatatccggatgtaccatcttaatcttattcaggtttttgctatcactgacggcgagaactgttttgacatcactgctcatatcttttgccgagagtacaacaaacgcgttatctgcatcgttatcactcagcgccagaatggcccggcaacgatcgattcccgctttctttaatacagaactgtcattactgtcaccggggataacatcagcattatcgcctaagcgttgctcaagttgcttgatatcatcttcaggcaagttgctgataaccgttacgttttgtccgcgttgattcagttgcaggatcgtattgatggcgagaatcgaatgtccgcaaacaataaaatgatctttacgatgcattgtatgattgtttccttttacaagtttgttgaatcccccgcggataagcggaccaaaaattgaggtcatagatgtggcaaaaacggtaatgccggaaataatgaccgaaatagtgaacaatcgtgctgattcagaaacagggacaatatcgccatagccgacggttgacatggtttctatcgaaaaatagaacgcggtcatcaaactttctattcgcggattaaaaccttcgcttaaataaagcgcaccgtaggttgagtaaaacagtaatgtcgtgaaactaataaatgcaaaaattgtcccggctgcggcgctactgtgggagaagtctttgcgcagtatcagcaaaaacaccagcgtaaaaatgcaaaatccaatactaaatttcagccagggataaaaatgcagggtgtaaattagcgctatcaacaacaaaatgatactgattgcccatgcgagctttgcccggaacagtaagccaatggagttcaggacaagaaagacgccgagcataaagagtggggcgtttgccagcaaggagagatccaactctgaaaatgctttgatatggaaaatatcaagcaaattgaccgacataccatagattgttttaaaaataagcaatccatttaaaaagacggccagcgcgagaatgtcgtgccgaagggtcacccataaatttgttgctgtttgtttgaatgtagcccagtgactcactgatacctctgtaaccacaattttgtttaattatcttagcgtgcacattttctgaacatacatgcagcgcgtgaatgtgttaaacaatagtagatgactttatccgcagtaatcaaaggatttgagcgagcaactgtacctcaggaaaggtcatttttcctgaatatgctcacatcatataaagaaatacagataaagttattatctgcttgtggtggtgaatgcactgaccggctataaggaaaggccaaacaagaacacggttgcaaaaaccgtgcccttaaatattgaatctctattcagaacactttcttaaatggtttcactgaaacgtgttcatagactcctgccgctacgtacgggtcagcatcggcccaggcctgagctgcttccagcgattcaaattcagcaataacggttgagccagtaaatcccgcagcccctggatcgttactgtctaccgctggcattggaccagctgtcaacaaacgaccttcatcatgcagtaactgtaaacgtgctaaatgtgccggacgaacggaaaggcgtttttcgaggctatcagctttgtcttgagcgtaaataacatacaacacgggcacaactccttgttcgggaaagttgtaaagtacgttatttgaaagggcgaagatctgcaacggaaagatgatgtctttgttaaggccatgcataaagtaagggtaattacgccaaaaatgacattttcactgatcctgatcgtcttgccttattgaatatgattgctatttgcatttaaaatcgagacctggtttttctactgaaatgattatgacttcaatgacccttgatttacctcgccgcttcccctggccgacgttactttcggtctgcattcatggtgctgttgtggcgggtctgctctatacctcggtacatcaggttattgaactacctgcgcctgcgcagccgatttctgtcacgatggttacgcctgctgatctcgaaccgccacaagccgttcagccgccaccggagccggtggtagagccagaaccggaacctgagccgatccccgaaccgccaaaagaagcaccggtggtcattgaaaagccgaagccgaaacctaagccaaaaccgaagccggtgaaaaaggtacaggagcagccaaaacgcgatgtcaaacccgtagagtcgcgtccggcatcaccgtttgaaaatacggcaccggcacgcctgacatcaagtacagcaacggctgcaaccagcaagccggttaccagtgtggcttcaggaccacgcgcattaagccgtaatcagccgcagtatccggcacgagcacaggcattgcgcattgaagggcaggttaaagttaaatttgacgttacgccggatggtcgcgtggataacgtacaaatcctctcagccaagcctgcgaacatgtttgagcgtgaggtgaaaaatgcgatgcgcagatggcgttatgagccgggtaagccaggcagtgggattgtggtgaatatcctgtttaaaattaacggcaccaccgaaattcagtaagcagaaagtcaaaagcctccgaccggaggcttttgactattactcaacaggtaaggcgcgaggttttccttcaggatcaaccgcgacatacttaaataatgcttctgtcgctttatagcgttgcccaattggttcagacgctacttttttcacccacacttcaatattaatgctgaccgatgtcgtccctttctggacacagcgtgcatagcagcacaccacatcgccgaccgcaaccggccgtaagaaagtcattccttcaacccgcacagtcactacgcgaccgtgggcaatttcttttgccagaatagcgccgccaatatccatttgtgacattaaccaaccaccaaagatgtcaccattggcattggtatcggcgggcatggctaaagtacgtaaaacaagatcgccctgagggacgttatgtgttgtagacatggtaaaaccgacttaaaaggaaaatcacaggcgcgatgctactatgattttcctgaggagaacagaggagatacagcgccagccccgaaggactggcagtctggttaggatttatcttcctgcggcatgtggcggtagatatagataccgcttaacaatgtgaagattaaggtaagggcggtcaggccaaagactttaaagttgacccaaatattttgcggcagccagaatgcgatgtagatgtttgccagaccgcaaaggataaagaaaacagcccaggccagattcagcttcgaccataccggttgcggcagcgtgagttctttacccagcatccgctgaattagcggctttttcatcacccattggctgactaacagggctcccgcaaatagagcataaatgacagtaaccttccatttaataaactcatcattgtggaagaacagcgtcaagccaccgaagacgaccaccagaacaaaagtgatcagggccatcttctcaaccttacgaaagcgaacccagctatagataagcacaatcgccgtggcgacgatcagcgccgcagtagccgcatagatgtcataaatcttgtaaaacgcgaaaaagacaaccagcggtaaaaaatcaagaaactgcttcattttacgattccgtaatcaaatgcttaaggttattggcgaatcaacatatacaggcggaacagatagatgagcaatatggctgaaatcaggttgctcaaggtgttcgccagtacggcaccaatttccggggttaatgcggcaaaagaagaggcaaaaagcagcaacagtgtttttgccagcaaccagctcagtactgcgggtgccaccagacgcatattcgcccaagtcagccgcatactgctacgcatcgaggcaaaaacgcccattttgtcctgtaccaacatcaccggtgccagggccagtaaaatggccatgataattcccggaacgaccaccagcatgatgccaatctgtactaaaagggtagtcagaaaaatcagaataaataactttggcaatatcggcgcactggcaccaatagctcgcagcgcactgactctctgacccgcagacaccagctggataattaatattacgcctccggcgagaatggcgttaccgattaatcctgaaaaagtggacgccgctgaagcctgcagcaaaatttgttgctgttccggtgacatattctgaaccaggtcgaacaacccactactgccgctaacgggcacgccgtcattgagctgcgcaagctgtgcatcactgggtgagaaaacatgccctaacaccactgtgataaacgcacatagcaacgataccaacagaatggtcataaattgattacggaagaaatttccggtgtcacggtatacggactgcgccgtgatagacatgcactctccttgagttttatgcaggtgttaattagcgggcaattgtaccctggttaagcctcgggtggcagcatcaggtcttgtatggaaaagcatatctttgtaaagcggaggtaattgctggccttcaggcatgggcaaatcgcggcaagtggcgaccgagttaatatttgcgtagcgaaaatatttaaaaattgatttaaatcacattaaccaggattctcaatgcaacttctaaattaatccagatcaataaagggtgaattatcatatgtaatgtgatctatgtaggatcatttgttactccaatgtaggtatattcgtcacgtttttataaccataacgacggagcggatatgaaaaagttaacagtggcggctttggcagtaacaactcttctctctggcagtgcctttgcgcatgaagcaggcgaattttttatgcgtgcaggttctgcaaccgtacgtccaacagaaggtgctggtggtacgttaggaagtctgggtggattcagcgtgaccaataacacgcaactgggccttacgtttacttatatggcgaccgacaacattggtgtggaattactggcagcgacgccgttccgccataaaatcggcacccgggcgaccggcgatattgcaaccgttcatcatctgccaccaacactgatggcgcagtggtattttggtgatgccagcagcaaattccgtccttacgttggggcaggtattaactacaccaccttctttgataatggatttaacgatcatggcaaagaggcagggctttccgatctcagtctgaaagattcctggggagctgccgggcaggtgggggttgattatctgattaaccgtgactggttggttaacatgtcagtgtggtacatggatatcgataccaccgccaattataagctgggcggtgcacagcaacacgatagcgtacgcctcgatccgtgggtgtttatgttctcagcaggatatcgtttttaattccgcacaaaaacgaccccgtaatatacggggtcaataaggacatggtataaagggtattatttcttcgcttctacgccatcagtttcagagcgaattaaaaatttctcagttgtttgcggaatattctgaatcagccagtcggccatttgcttttcctcatttaaaatcgcttcgatggttggaattgaagctgtatcaccggcattttttgctgctgctaatagtgaggtgtaacaggcgatttcaaattgctcgaagacatatccgctaatagagcctttgactatttcatcagaagggaatataccaccgattgactgcccaagcgcagccattttactcatggaatctttaatgactgaacgtgaaatgtcattacgatcaagaatagtttccagttgaacaatctggtttttggtttcactaagatgttgttcaatacgagcgcgtagttcaggataattatctatacggctggccatggattcaagcatagattcggcttgcttttccattgcgtgggcgtcacgtaaccagtcatgataatgttcaatacgattcatgaaaatgtcctctttataaaatgactaaaagttaaaattcatatttcaggctttattttcggctttcttatttacgttattaatggccagatcagtcagtttgatgtcggtggccttttcttcttccagggtttctttcagaagcttcgctgctttacggtaacctaattgttcagccagcgtcgctaatgtcccgtaactggcaatctcataatgctcgactttctgtgctgcggcaatcagtgcggcatcacgcacttcgtttttctcggtactttcgatgacctcattagcttcttcaataagaccttccattgccacacatttcatgcgcttaattttcaggttcgattcggactccacaacttgatcaatacgttcaatctgtccatgagtttcctcgaggtgcgcatgaaaagcctgacttaatttttcatttgatgttgctcttgcgagttttgccagtgcccgggttaattgtttttctgcgctgtaggtatctgaaagcaggtgaataaatacatcttcaatggtcttcatattcatatttttctccagtgaaatcactgcgagccatacggcccgcagatgcaattatctttatcagctgatattaataattaacggtgaatcaggatttgcctgatttattaccaccgctttgttgaccgccttttttacccgcttcagatgcgcgttgcggatcatttttaaaattaccgccgctatgctgaccgcctttacggcctgcgtcggatgccttctcacggtcttcggcgaaatttcctgaaccaccacgatgttcggccatgttatttctcccgttgcgttgcattgtttcattaatatgagtgttgtgtgtcgacactcattaaaattagtcgctaatgagaattagtcaaattaagcgcaacgagaagatagagggaaaatatattttgaggaacattctggatatattaacaattacctgaggaataagtgacttagagaaaattattgattttactggtgttatgttgcgggattaatttgtttgattatattactgttgggcggaaaaatgacgtaagttgacgttcgaccggggtaagcgaaacggtaaaaagataaatattaaatgaatttaggatttttccggcttcattaaagaaagttaaaatgccgccagcggaactggcggctgtgggattaactgcgcgtcgccgctttcatcggttgtacaaaaactttcagtgccgccagcattttctctggctcattaatatgttgctcgatgattttaacaatggccgaaccagaaatcgcgcccgcagctcctgcatcaatcgctgcttttacctgatccggggcggaaataccaaatccctgcaatggaggtgcagcgttgtactctttcagcttcgcaaccagatgattgaggggtaacgcggcgcggttttctgcgccggtcacgcctgctcgtgacagcaaataggtgtaaccacgaccgtaagaggctatctggcgcagcaggtcgtcatcggcatttggcgggcagatgaagataggtgcgacattatgacgcaacgcggcctggcggaagggcgcggactcttcaactggcacatcggcaaccagcaccgaatcgacgccgactttttcgcactgggcataaaactcatcaatgcctttgttaaacaccagattggcatacatcaacaggccaatgggaatggtcgggtgtttctggcgaatcagtgccagcatttcaaaacattgtgccggagtcacacctgccgcaaaggcgcgcagagtggcgttttgaatcgtcgggccatccgccagtgggtcggagaaggggatacctaactccagcgcgtcagcaccggcttcaattagcgtatcgataattttcaatgactgctcaatgcccggatcaccgagcgtgacgaaaggaacgaatgcgccttctttgcgctccttcaactgggcaaacagagattcgtagcgttccatcagatttcccctcgtgctttcaaaatatcgtgaacggtgaagatgtctttatcgccgcgaccggaaaggttaaccaccagtagctgctctttatccgggttttcgcgcatcattttcaacgcatgggccagggcgtgggaggattccagcgccgggatgatcccttcgtgcaggcacagcgttttgaaggcttcaagggcttcatcatcggtaatagacacgtaatcagcgcgtccagtgctgttaagatacgcgtgttgtgggccgacagacgggaaatccagtccggcggagatggagtaagattcttcaatctgcccgtcttcggtttgcatcatcggcgctttcataccgaaatagatacccacgcgaccatgttttagcggtgcgccgtgctcgccagtttcgataccgtgaccacctggctccacaccaatcaggccgacgttggtttcattgatgaaatcagcaaacatgccgatggcattcgaaccgccgccaacacaggcgataacggcatccggcaggcgaccttctctttccagaatctgcgctttggtttcttcgccaatcatccgctgaaactcacgcacaatggtcggataaggatgcgggccagctgcggtgcccagcatatagtgcgcggtttcgtaactaccggaccagtcgcgcagcgcctcgttacaggcatctttcagcgtcgcggaaccgctatgcaccgggatcacttccgcacccattaagcgcatacgaaaaacgttaggcgactggcgttcaacgtctttggcacccatataaatacggcatttcaggccgagcagggcgctggcaagggccgacgccacgccatgctgaccggcaccggtttcggcgatgatttcggttttacccatccgcttcgccagcaacgcctgccccagcacctggttagttttatgcgcgccgccgtgcagcaaatcttcacgcttgagatacagcgtggtgttcgtcccggctgtaatgttctggcatttggtcagcgcggttggacgcccggcatagtttttcagcaggtcgttgaactgagcctgaaattcaggatctttttgcgcactgacaaaagcttcttccagctggcgcagagcaggcatcaggatttgtggcacgtacatgccgccaaactcaccaaaataggggttaagtaatgttgtcattgttcctttccttaatatgcgcgcagcgtctggaaaaccgaggccaaaagacgtgcgtctttgatgcccggttgcgactctacagcagaattaaaatcaagtccggcgcagccggtttgtgccgcttccacgcagttatctgcgcctaagccccccgccagcagaacgttgccaagcgattgaccatttaatagtgaccagtcaaaacgttgcccgcttccaccctggccgttgtctaaaacatatttatcaacgtgctgaaactcgcgggcgggcagggtttcaccgacgcttaatgctttccagatggcaacatgtgctggcagagcttcacgcagcgtatcgatatacagctgttcttcattaccatgcagttgcactgccgccagcgataacaccttagctttgtccaccacatcggcaatatcgtgattgcggaacacgccaacatactgcaacggtgccgcagccatcacttcctgcgcctgttcaacgttgacgcaacgcggtgatgtcgcaacaaaaatcaacccaccgtaaatcgcgcccgcgtcataagctgctttagcatcttgcccacgcgtcaggccacatactttattctcacccagcaacacccggcgcacggcggcgtgcaaatcgtcatgggccatcaacgccgaaccaatcagaaaaccgttagcgaagtggcttaactcgcgcacctgagcgtaagtattgatgccggattcgctgattaccgtcacgttgtgccccagtttcggcgcaagctcgcgggtacggttgagatcaatcgacaaatcacgcagatcgcggttgttgatgccaacgacctttgctcccaatgcaatggcgcgctcctgttcctcttcattactgacttcggtcagcacccccatctccagactgtgagcgacggcggcaagctggcgatattggtcgtcatccagtactgaaagcattaataagcaggcatcggcctggtaatagcgcgccagatagatctggtaagggtcgataatgaagtctttacataaaatcggctgcggggcgatttggctgacgatggggaggaaattaaagctcccctgaaaatatttctcatcagtcagcaccgaaattgccgaagcgtaatgtttataaatggcggcaatgcgtgctggatcgaaatcatcacggatcacgccttttgacggcgacgctttcttgcactccagaataaacgccgtgcgcgcaccctgtagcgcatcataaaaatgtcgcgtgctcggctgaacctcattctgaaaactggccagcggttgctgctgtttgcgggcttctacccaaatcgccttgtctgcgacgattttcgctaaaacggtttgcatcatttaccctcgtgccgccagtgcggtgactctgtcgtaagcggaaccactgcgcagtacctcaagaacggtttgcgcattggcttgcagatcttcatggccatgcaggcgcattaacatggcgacgttcgcagcgacggctgcttcatgggcggcgtcgcctttaccttgtaacaaacgtgttaaaatgtcacggttttcttccggtgttccgcctgccagttgctcctggtggtagggtgtcaggccaaagtcttctgcggtgagctgatagcttttaatttcgccgtcatgcagttcggcaacgattgtcggcgcgtgtaatgaaacttcatccatcccgccgctgtgcaccaccgccgcgcgttgataccccagcacgcgcaaggtttcggcaatcggcagcaccagttccggactataaacaccaattaacgccagcggcggatgcgccgggttaatcaatggccccagcacattgaacagggtgcgggttttcagttgctggcgaaccggcatcgcgtggcggaatccggtgtgatacttcggcgcaaagaggaaacatacacctaactcatccagcgcctggcgcgatttatcggcgttcatatcaagattaataccgaacgccgccagcagatcggacgaaccagatttactggagacgctacggttgccgtgtttcgccactttcagcccacaggccgcggcgacaaacgcactggcggtagaaatattgatactgttgctgccgtcaccgccagtaccgacgatatcagcaaacagataatccgggcgcgggaacggcgctgcgttttccagtagcgcggttgctgccccggcgatctcgttcgggtgctcaccgcgaattttcatgctcaccagcgccgccgccagttgttccggcttcagctcgccacgcaccaccgctgaaaacagctggtggctttcttgttggctaagcgtctgcgcctgatacagtttttccagaatcggttgcagcgtgttggctggctctagtttctgctgcgcccaggccagcgtttgttccagcaggcgagcgccctgggtggtgagaatggattccggatggaactggaatccacaaacgcgatccgcatcgtgacgtactgccatcaccatgccattaaaatgggcgttgatggttaaaccggccggaatgttactgccaaccagcgagtgataacgcgccaccggcagcgggtttgttaatccggcaaacatcgcctgaccgtcatgttcaatgctggaggctttaccgtggagaatttcgcccgcctgaccgacatagcccccgtaagcttcgacaatcgcctgatgtccgaggcaaatgccaataatgggcagcttgccacgcaagcgggtgaggagttccggcatacaaccggcttcgctcggcacaccggggccaggagaaagcatcagcaccggattgctcatggtcgccaggcgttcaattaaggtttgcgccggaatatggttgcggtaaatcaccacgttatgcccattgctgcgcaactgatctgccaggttgtacgtaaaagagtcgatattatcgagcagcagaatgtcagccatcagaaagtctcctgtgcatgatgcgcggtggcaatagcgcgcagtacagcgcgggctttgttacgggtttcgtcggcttccgactgcggaacagaatcaaggactacaccagcacccgcttgcacggtggcgataccgttttccaccagcgccgagcggatcacaatgcaggtgtcgagatcgccatgcgcggtgaaataacctaccgcgccgccgtagctgccgcggcgacgaccttccgcctcggcaattaactgcatagcgcgtactttcggcgcaccgcttaacgtccccatattcatacaggcgcgataagcgtgcagggcgtcaagatcgtgacgcagttcgccgactacgcgagagacgaggtgcatcacataggaataacggtcaactttggtgagatcggcgacgtagcggctgccgggggtgcaaatgcgtgccagatcattacgggcgagatcaaccagcatcagatgttcagacagctctttatgatcggtacgcatttccagttcaatacggctgtcgagatctctgtccagtgaaccatcggcgcgacgaccgcgtgggcgtgttccggcaatcgggtagatctcaatctggcggctggtggcatcatacttgagcgagctttccggcgacgcgccaaatagggtgaaatcattatcctgcataaaaaacatgtacgggctgggattactctttttcagcacgtaataggccgccagcggtgacgggcagggcagagagaaacggcgagatggcaccacctggaaaatttctccagcgcgaatcgctttttgcaacaaacgcactacgccaccgaactcttcatcgctctgattacattcacaacgcatatgcggcacggaaaccactggcagcggcggcgcggcttcggtcagttgctgacgtagttcgttcaggcgagcagtgagacgttgtttttcttcttcattcggagcaaacaggctggcctgaatacgggtgctttttttctgatggtcaatcaccatcagcgtttcagcgagataaaaacagaaatcagggcagttattttccgctgacagttgcggtaaatcttcaaatcccgccacaaggtcataagagaacaggccgccgaagaacatggcttctcgttcttccttcggtacattcaacagattctgcaataaacggaaagcgtcaaaaaccgaaagggagcataagcgggcgtcttcatccagcagtggactgacaggggggaagcgcagcacacggcagtttggtgattgttcactttccacacccgcaggcagggcgttatccagtagtgccaggagggcttcgccgttgccggaaagtgcctggattgtgacagtgtcacctaaagctgtaatgcgcagcgcactgtctaccagcagcaggctttttaaatcatctttgctgtcgatatctgcggattccagcagcagcgttgccggacgatccccacacaactggtgaaaaagcgcggtgggattgtcgcgataagcgccttcgcaggttagcagttcgagagtcggtttttgtgtttgcattgttattctctaattttgttcaaaaaaaagcccgctcattaggcgggctgggtatctgattgctttacgcatggtgaatacactgcccgtttcaggaagtgcgccaccaacctttcagtacgaaaattgctttcattgtcgataccctttttacgtgaacttgcgtactagttaactagttcgatgattaattgtcaacagctcatttcagaatatttgccagaaccgttatgatgtcggcgcaaaaaacattatccagaacgggagtgcgccttgagcgacacgaattatgcagtgatttacgacctgcacagccataccacagcttccgatggctgcctgacgccagaagcattggtgcaccgtgcagtcgagatgcgcgtcggcaccctggcgatcaccgaccatgacaccacagctgcaatcgcgccagcaagagaggaaatttcacgttcgggactggcgttgaatcttattcccggcgtggaaatttccacggtctgggaaaatcatgaaattcatattgtcgggctgaatattgatattactcatccgctaatgtgtgagttcctcgcgcagcagacagaacggcgcaatcagcgggcgcagctgattgccgaaagacttgaaaaagcgcaaatacctggggcgctggaaggcgcacaacgactggcgcagggcggcgcagtgacgcgcggtcattttgcgcgtttccttgttgagtgcggcaaagccagttcaatggcggatgtctttaaaaagtatctggcgcgcgggaaaaccggatacgttccgccacagtggtgtacaatagaacaagctattgatgtcattcatcattctggcggtaaggcggtgctagctcatcctgggcggtacaatcttagtgctaaatggctgaaaagattggttgcgcattttgccgaacaccacggtgacgcgatggaagtcgcgcagtgccagcaatcgcccaatgaacgtacccagctggcggcccttgcgcgtcagcatcatttatgggcatcacaaggatctgattttcatcagccatgcccgtggatcgaactgggtcgtaaactctggctgcccgcaggcgttgaaggcgtctggcagctatgggaacagccgcagaacaccacagagagggaattatgagccagtttttttatattcatcctgataacccacagcaacgtctgatcaaccaggcggtggagatcgtgcgtaaaggcggggtgattgtttatccaactgattccggctatgcgctcggctgtaaaattgaagataaaaacgcgatggagcgtatttgtcgtattcgccagctgccggacggtcacaactttaccctgatgtgtcgcgatctttctgaactctcgacctattcatttgttgataacgttgcgtttcgtttaatgaaaaacaacacgccgggcaactataccttcatcctgaaggggacgaaggaagtgccacgccgtctgttgcaggaaaaacgcaaaaccatcggtatgcgtgtgccttctaaccctatcgctcaggcgttacttgaagcattgggcgaaccgatgctttccacttcgctaatgctgccaggcagcgaatttaccgaatcggacccggaagaaattaaagatcgtctggaaaaacaggtagatttgattattcacggcggctatctcgggcagaaaccgacaacggttattgatcttaccgatgatacgccggtcgtggtgcgtgaaggcgtaggtgatgtgaagcctttcttataacaaattgcgttccacggatggaagactatggcagggaagtttcgctgcattttgctgttgatagcagggctgtttgtatcatctctaagttatgcagaaaacacggagatcccttcttatgaagaagggatctcgctctttgatgttgaagccactctgcaaccagatggggtgctcgacatcaaagaaaatattcattttcaggcgcgaaatcagcagattaagcacggcttttatcgtgatttaccacgactatggatgcagcctgatggggacgctgcactgctgaactatcatattgttggcgtcacccgtgatggtattcctgaaccctggcatcttgactggcatatcgggttaatgagtattgtcgtgggcgataaacaacgtttcttgcctcaaggcgactatcattatcaaattcattatcaggttaaaaatgctttcctgcgtgagggggattctgatctgctaatctggaacgtgaccggtaaccactggccgtttgaaatttataagacccgtttttctctccagttctctaatattgcgggtaatccatttagcgaaatcgatctttttaccggagaagagggcgacacatatcgtaatggccgcatccttgaggacggaagaattgaatcccgcgatccgttttatcgtgaagatttcacggtcctctaccgctggcctcacgctttacttagcaatgcctcggctccgcaaacgacgaatattttcagccatcttcttttaccctccacgtcatcgttgttaatttggtttccgtgtctgttcctggtttgtggatggttatatctctggaagcgcaggccgcaatttacgccggtagatgtgattgaaaccgatgtcattccgccagattacacgcccggcatgttacgtctcgatgcgaagctagtttacgacgataaaggtttttgtgccgatatcgtaaatctgattgtgaaaggaaaaattcatctggaagatcagtctgacaagaaccagcaaatcctgattcgtgttaatgaaggcgcgaccagaaataatgcggtattactgcccgcagagcagttattactggaagcgttatttcgtaaaggcgataaggtcgttcttacggggagacgcaacagagtcttacgcagggcatttttacggatgcagaaattttatctgccgcgtaaaaagtcttcgttttaccggtctgatacttttttgcaatggggtggactggcaatattggcggtcattctttacggtaacttgagtcctgtaggctgggcaggaatgagtctggtgggcgatatgtttattatgatctgctggattattccttttttattttgttcccttgagcttttgtttgcccgcgatgatgacaagccttgcgttaatcgtgtaatcatcactttgtttttaccactgatttgttcaggcgtggccttctattctctctacatcaatgtcggagatgtattcttttactggtatatgccagcgggttattttaccgctgtttgcctgaccggttatctcactggcatggggtatatttttctgccaaagtttacccaaactggacagcaacgttatgcccacggtgaagctatcgttaactatcttgcgcgtaaagaggcagcaacacacagtggacgtcggcggaaaggggaaacacggaaactggattacgcgttgctaggttgggctatatcggcaaatttggggagggaatgggcgttacgcattgccccttcgctttcttcggcgattcgcgctccagagattgcccgtaacggcgttttattctcattacagacgcacctaagttgcggggccaataccagtttgttggggcgaagttattccggtggtggtgctggcggcggcgcgggtggcggaggcggtggtggctggtaattaagctgatgttaatcgaaacaagctttaaccataaagatagtgtagtatgttgcgcctcaaagccaggccgataaacgtcgagtcgtttacttaaggcctgaagagttcaaacagactttactatcagtgagtcagatgtaagttctgactcactgttgcacaaaagcatatcagacgcctgggaaggcgacaccaaaaggaagctctatgagcgaaaagctacagaaagtgctggcgcgtgccggccacggttctcgccgtgaaatcgaatctattattgaagccggtcgtgtgagtgttgatggcaaaattgctaaactcggcgatcgtgttgaagttacccctggattgaaaatccgtatcgatggtcacctgatttcggtacgtgagtccgctgaacaaatttgtcgcgttctggcctattacaaaccggaaggtgagttgtgtacccgtaacgatccggaaggacgtccaacggtgtttgaccgtctgccaaaactgcgtggcgcacgctggattgccgtgggtcgcttggacgttaatacctgtggtctgctgctgttcaccaccgatggtgaactggcaaaccgtttaatgcacccaagccgtgaagttgaacgtgaatatgccgtgcgtgtatttggtcaggttgacgacgcgaaactgcgtgatttgagtcgtggcgtgcagttggaagatggtccggcagcttttaaaaccatcaagttcagcggcggcgaagggatcaaccagtggtacaacgtgactctgaccgaaggccgtaaccgtgaagttcgtcgtctgtgggaagcggttggtgtgcaggtgagccgcctgatccgtgttcgttacggtgatatcccactgccaaaaggtctgccacgcggtggctggacggagctggacctcgcccagactaactatctgcgcgaactggtggagctaccgccagaaaccagctctaaagtcgctgtagaaaaagaccgtcgtcgcatgaaggcgaatcagattcgtcgtgcggtgaaacgtcacagtcaggtgagcggcggtcgtcgttctggcggacgtaataataacggttaatcaaagtatgccggacgtcatatccggcatttttacagattaataatcgatccctatctgcgcttttacaccggcatcaaacgcatgtttgacggggcgtaattcacttaccgtatctgccagttcaagaatatcccgatgacaaccacgacccgtgataatcaccgtctgttgatgtggacgttcatttaacgcctgcaccacttcttccagtggcaaatagtcatacgccaccatatacgtcagttcatcaagcaaaaccatatccagtgaggaatcagcaagcatccgctttgcatgttgccagacttcgcggcaggcggcggtatcagactcgcggttttgtgtatcccaggtaaagcccgttgccatcacctgaaactcaacgccatgtggctccagcagattgcgttcgccattaggccaggtgcctttaataaactgcacgacgcctactttttttccgtgaccaactgcgcgtgttgccgtaccaaatgccgcggtggttttgccttttccattgccggtaaagacgatgataataccgcgttcatcctgggcctgggccacacgagcatctactttttctttcactcgctgctgacgctgttggtagcgttcatcactcattgggaaattcctggtttacggcccggttgggcgtcaaaggtcatgccggttttacggcggctgtcatcgcccatcagccagaggtagagcggcatgatatcagcgggtgttttaagtttctgtggatcttcggtcgggaaggcgctggcacgcattgcggtgcgcgtaccgcctgggttaatgcagttgacacgcaggcgctgctgatattcatcggccagtacctgcatcatcccttcggtggcaaatttcgacgctgcatatgcaccccagttggctcgtccctgacgtccaacgcttgatgaagtaaagaccagtgaaccggcgtccgatttgagtaataaaggaagcagtgcctgggtgagcataaaggtggcattaacgttgacctgcatgacgtcctgccagacctgcggattttgttcgctcattgggcaaacatcgccgagcaatccggcattatgcaaaacaccatccagacgcggataattaacggcaatgcgctgtgccagttgttggcaattttcggacgtgcaggtcagcaaatcgagaataaaccactgtggctgacgcccagtttcttcgtttatgtggctggctacctgacgtaatttttcttcattacggcccaacagaatcactgtcgcaccatagcgtgcatacgtcatcgcggcttcacgaccaataccatcgctggctcccgtcaccaggataatgcgatcattgagtaaatcttgttttggctggtaatgcatggctactcctcaacgacgttgtctgtcgcgctgccagtgtactttatgactttggggctttatgcctgaaacagaagggcatttcaatcagcctggggcgataacaccgcaaaatggatactttgtcatactttcgctgcaataacatctctgcgagacggcttaacatgcctgttgtaaactgtgagccaaagcgttgtttaaccaaggtggggactcgtggaattgttgtctgaatatggtttgtttttggcgaaaatcgttaccgttgtgctagcgattgcggcgattgccgccattattgtcaatgttgctcaacgtaataaacgccagcgtggcgagttacgggtcaacaatctcagcgaacagtataaggagatgaaagaagaactggccgcggcgctgatggactcacatcagcaaaaacagtggcacaaagcgcagaagaaaaagcataagcaagaagcgaaagcagcaaaagcgaaagccaaactgggcgaggtggcaactgacagtaaaccccgcgtctgggtgctggattttaaaggcagcatggacgcccatgaagtgaactcgctacgtgaagagataacggctgtactcgcagcattcaaaccgcaggatcaggttgtgctccgtctggaaagccctggtggcatggtgcatggttacgggctggcggcttcgcaactgcagcgtctgcgcgataaaaacattcctttaactgttacggtagacaaagtcgctgccagcggcggttacatgatggcctgtgtggcggacaaaattgtttccgcaccgtttgctattgtgggttccattggcgtggtggcgcaaatgcccaactttaaccgcttcctgaaaagcaaagatattgatatcgaactgcacactgccgggcagtataagcgcacgctgacgttgctgggtgaaaataccgaagaagggcgggagaaattccgcgaagagttgaacgaaacgcatcagttgtttaaagattttgtgaagcgtatgcgtccttctctggatattgaacaggtggcaacgggtgaacactggtacggacaacaggcggtagagaaaggcctggttgatgaaatcaacaccagtgatgaagttattcttagcctgatggaaggccgtgaagtggtcaatgtacgctatatgcagcgtaaacgactcattgaccgattcaccggcagcgcggcagagagcgccgatcgattgttgctacgctggtggcagcggggtcaaaagccattgatgtaaaagacaaacgcgaggctaagacctcgcgttttgctttaatcaaccagatgatatttttctgaaagcacatgggccaggtgtttgaacatattaaacaccgcggtgcttttggctgttggcaatccttgttcatctaaaaagtagtcgccggtaaataccagcacgccattacgctgcgtgacgccggtggcttcaatccctgcgagcgtatcctcatgctcacgaatgattttgttggcctctttcaacagcgtttcgcggtcgatgggttgtgtctctttgttcattatttactccttaaacaaggacattagtctacgccaggcatggcttgcagacaaatataccacgctggtggcaagagcgccttactggcaactttggattttgcatgctaataaagttgcgtatcggattttatcaggtacagtgtgacgctttcgtcaatctggcaatagatttgcttgacattcgaccaaaattccgtcgtgctatagcgcctgtaggccaagacctgttaactcagtcacctgaattttcgtgaacagagtcacgacaaggggttgatatccgcagagagcgagtccatatcggtaactcgttgccagtggaaggtttatcaacgtgcgacgcattcctggaagaatcaaattaggtaaggtgaatatgggtaaagctcttgtcatcgttgagtccccggcaaaagccaaaacgatcaacaagtatctgggtagtgactacgtggtgaaatccagcgtcggtcacatccgcgatttgccgaccagtggctcagctgccaaaaagagtgccgactctacctccaccaagacggctaaaaagcctaaaaaggatgaacgtggcgctctcgtcaaccgtatgggggttgacccgtggcacaattgggaggcgcactatgaagtgttgcctggtaaagagaaggtcgtctctgaactgaaacaactggctgaaaaagccgaccacatctatctcgcaaccgaccttgaccgcgaaggggaagccattgcatggcacctgcgggaagtgattgggggtgatgatgcgcgctatagccgagtggtgtttaacgaaattactaaaaacgcgatccgccaggcatttaacaaaccgggtgagctgaatattgatcgtgttaatgcccagcaggcgcgtcgctttatggaccgcgtggtggggtatatggtttcgccgctgctatggaaaaagatcgctcgtggcctgtctgccggtcgtgtgcagtcggtggcggttcgcctggtggtcgagcgtgagcgtgaaattaaagcgttcgtgccggaagagttctgggaagtcgatgccagcacgaccacgccatctggtgaagcgttggcgttacaggtgactcatcagaacgacaaaccgttccgtccggtcaacaaagaacaaactcaggctgcggtaagtctgctggaaaaagcgcgctacagcgtgctggaacgtgaagacaaaccgacaaccagtaaacctggcgctccttttattacctctacgctgcaacaagctgccagcacccgtcttggatttggcgtgaaaaaaaccatgatgatggcgcagcgtttgtatgaagcaggctatatcacttacatgcgtaccgactccactaacctgagtcaggacgcggtaaatatggttcgcggttatatcagcgataattttggtaagaaatatctgccggaaagtccgaatcagtacgccagcaaagaaaactcacaggaagcgcacgaagcgattcgtccttctgacgtcaatgtgatggcggaatcgctgaaggatatggaagcagatgcgcagaaactgtaccagttaatctggcgtcagttcgttgcctgccagatgaccccagcgaaatatgactccacgacgctgaccgttggtgcgggcgatttccgcctgaaagcacgcggtcgtattttgcgttttgatggctggacaaaagtgatgcctgcgttgcgtaaaggcgatgaagatcgcatcttaccagcagttaataaaggcgatgctctgacgctcgttgaacttacaccagcccagcactttaccaagccgccagcccgtttcagtgaagcatcgctggttaaagagctggaaaaacgcggtatcggtcgtccgtctacctatgcgtcgatcatttcgaccattcaggatcgtggctacgtgcgagtagaaaatcgtcgtttctatgcggaaaaaatgggcgaaatcgtcaccgatcgccttgaagaaaatttccgcgagttaatgaactacgactttaccgcgcagatggaaaacagcctcgaccaggtggcaaatcacgaagcagagtggaaagctgtactggatcacttcttctcggatttcacccagcagttagataaagctgaaaaagatccggaagagggtggtatgcgcccgaaccagatggttctgaccagcattgactgcccgacttgtggtcgcaaaatggggattcgcacagcgagcaccggggtattccttggctgttctggctatgcgctgccgccgaaagagcgttgcaaaaccaccattaacctggtgccggaaaacgaagtgctgaacgtgctggaaggcgaagatgctgaaaccaacgcgctgcgcgcaaaacgtcgttgcccgaaatgcggcacggcgatggacagctatctcatcgatccgaaacgtaagttgcatgtctgtggtaataacccaacctgcgacggttacgagatcgaagagggcgaattccgcattaaaggttatgacggcccgatcgttgagtgtgaaaaatgtggctctgaaatgcacctgaaaatggggcgtttcggtaaatacatggcctgcaccaacgaagagtgtaaaaacacacgtaagattttacgtaacggcgaagtggcaccaccgaaagaagatccggtgccattacctgagctgccgtgcgaaaaatcagatgcttatttcgtgctgcgtgacggtgctgccggtgtgttcctggctgccaacactttcccgaaatcgcgtgaaacgcgtgcgccactggtggaagagctttatcgcttccgcgaccgtctgccggaaaaactgcgttatctggccgatgcgccacagcaggatccggaaggtaataagaccatggttcgctttagccgtaaaaccaaacagcaatatgtctcttcggaaaaagacggaaaggcgactggctggtcagcattttatgttgatggcaaatgggttgaaggaaaaaaataacctttaattctgtcaggtttttataaacaaagggtcgcgaaagcggcccttttttattgcatattattttttcttcacacctatacactaaggctataaatgatatagtggttatagttagcaccttttttattattaaatcgtattagtcacccgccaggtgtgacgaaaaaacgatgttctgatggcgtctaagtggatggtttaacatgaaattacaacaacttcgctatattgttgaggtggtcaatcataacctgaatgtctcatcaacagcggaaggactttacacatcacaacccgggatcagtaaacaagtcagaatgctggaagacgagctaggcattcaaattttttcccgaagcggcaagcacctgacgcaggtaacgccagcagggcaagaaataattcgtatcgctcgcgaagtcctgtcgaaagtcgatgccataaaatcggttgccggagagcacacctggccggataaaggttcactgtatatcgccaccacgcatacccaggcacgctacgcattaccaaacgtcatcaaaggctttattgagcgttatcctcgcgtttctttgcatatgcaccagggctcgccgacacaaattgctgatgccgtctctaaaggcaatgctgatttcgctatcgccacagaagcgctgcatctgtatgaagatttagtgatgttaccgtgctaccactggaatcgggctattgtagtcactccggatcacccgctggcaggcaaaaaagccattaccattgaagaactggcgcaatatccgttggtgacatataccttcggctttaccggacgttcagaactggatactgcctttaatcgcgcagggttaacgccgcgtatcgttttcacggcaacggatgctgacgtcattaaaacttacgtccggttagggctgggggtaggggtcattgccagcatggcggtggatccggtcgccgatcccgaccttgtgcgtgttgatgctcacgatatcttcagccacagtacaaccaaaattggttttcgccgtagtactttcttgcgcagttatatgtatgatttcattcagcgttttgcaccgcatttaacgcgtgatgtcgttgatgcggctgtcgcattgcgctctaatgaagaaattgaggtcatgtttaaagatataaaactgccggaaaaataatttcttgcgttattttcggcaccttttatgtagcgaaggtgccggaatatattctcttttgttacttatttctataccgtgcacaatatttttatccctcatatttatagggtaaattacctgtaaagtagtgtctaattacccgcctcgcaaactccagttttcaaatatctatttcaggtcaaaagattgaattattcactggagacgattcgtaaattcgctggatttttgactaaagtttctttaggatttgtctcatcgtatgattaattacaccaatcgttcaacgtcttgctgataagtgatggcgattatatgaggttagcaatgccttctggaaatcaggaaccccgccgcgatcctgaattaaaacgtaaagcctggctggcggtttttcttggttctgcacttttctgggtggttgtcgcactgctgatttggaaagtgtggggataactatggtcggtcaggagcaactggagtcgtcaccattatgccagcatagtgacaatgaaacagaaacgaaacgggaatgttccgtcgttattccagacgactggcaactaacatcgcagcagcaagcctttatagaactgtttgctgaagatgatcagccgaaacaataattatcatcattcttattacccatttttaatgaattaaagggcttttaatacaccgcagcaataacagcttgagttatctcaacacaaaataataaccgttaagggtgtagcctatgatcaacacaaatatgaaatattggtcctggatgggcgcgttttctctgtcgatgctcttctgggccgaactcctctggatcattactcactgatccttgaccccgctgcggcggggttgtcatttgctttgccacaaggtttctcctcttttatcaatttgggttgttatcaaatcgttacgcgatgtttgtgttatctttaatattcaccctgaagagaatcagggcttcgcaaccctgtcattaaggaggagctatgtcgtcaaccctacgagaagccagtaaggacacgttgcaggccaaagataaaacttaccactactacagcctgccgcttgctgctaaatcactgggcgatatcacccgtctacccaagtcactcaaagttttgctcgaaaacctgctgcgctggcaggatggtaactcggttaccgaagaggatatccacgcgctggcaggatggctgaaaaatgcccatgctgaccgtgaaattgcctaccgcccggcaagggtgctgatgcaggactttaccggcgtacctgccgttgttgatctggcggcaatgcgcgaagcggttaaacgcctcggcggcgatactgcaaaggttaacccgctctcaccggtcgacctggtcattgaccactcggtgaccgtcgatcgttttggtgatgatgaggcatttgaagaaaacgtacgcctggaaatggagcgcaaccacgaacgttatgtgttcctgaaatggggaaagcaagcgttcagtcggtttagcgtcgtgccgccaggcacaggcatttgccatcaggttaacctcgaatatctcggcaaagcagtgtggagtgaattgcaggacggtgaatggattgcttatccggatacactcgttggtactgactcgcacaccaccatgatcaacggccttggcgtgctggggtggggcgttggtgggatcgaagcagaagccgcaatgttaggccagccggtttccatgcttatcccggatgtagtgggcttcaaacttaccggaaaattacgtgaaggtattaccgccacagacctggttctcactgttacccaaatgctgcgcaaacatggcgtggtggggaaattcgtcgaattttatggtgatggtctggattcactaccgttggcggatcgcgccaccattgccaatatgtcgccagaatatggtgccacctgtggcttcttcccaatcgatgctgtaaccctcgattacatgcgtttaagcgggcgcagcgaagatcaggtcgagttggtcgaaaaatatgccaaagcgcagggcatgtggcgtaacccgggcgatgaaccaatttttaccagtacgttagaactggatatgaatgacgttgaagcgagcctggcagggcctaaacgcccacaggatcgcgttgcactgcccgatgtaccaaaagcatttgccgccagtaacgaactggaagtgaatgccacgcataaagatcgccagccggtcgattatgttatgaacggacatcagtatcagttacctgatggcgctgtggtcattgctgcgataacctcgtgcaccaacacctctaacccaagtgtgctgatggccgcaggcttgctggcgaaaaaagccgtaactctgggcctcaagcggcaaccatgggtcaaagcgtcgctggcaccgggttcgaaagtcgtttctgattatctggcaaaagcgaaactgacaccgtatctcgacgaactggggtttaaccttgtgggatacggttgtaccacctgtattggtaactctgggccgctgcccgatcctatcgaaacggcaatcaaaaaaggcgatttaaccgtcggtgcggtgctgtccggcaaccgtaactttgaaggccgtatccatccgctggttaaaactaactggctggcctcgccgccgctggtggttgcctatgcgctggcgggaaatatgaatatcaacctggcttctgagcctatcggccatgatcgcaaaggcgatccggtttatctgaaagatatctggccatcggcacaagaaattgcccgtgcggtagaacaagtctccacagaaatgttccgcaaagagtacgcagaagtttttgaaggcacagcagagtggaagggaattaacgtcacacgatccgatacctacggttggcaggaggactcaacctatattcgcttatcgcctttctttgatgaaatgcaggcaacaccagcaccagtggaagatattcacggtgcgcggatcctcgcaatgctgggggattcagtcaccactgaccatatctctccggcgggcagtattaagcccgacagcccagcgggtcgatatctacaaggtcggggtgttgagcgaaaagactttaactcctacggttcgcggcgtggtaaccatgaagtgatgatgcgcggcaccttcgccaatattcgcatccgtaatgaaatggtgcctggcgttgaaggggggatgacgcggcatttacctgacagcgacgtagtctctatttatgatgctgcgatgcgctataagcaggagcaaacgccgctggcggtgattgccgggaaagagtatggatcaggctccagtcgtgactgggcggcaaaaggtccgcgtctgcttggtattcgtgtggtgattgccgaatcgtttgaacgaattcaccgttcgaatttaattggcatgggcatcctgccgctggaatttccgcaaggcgtaacgcgtaaaacgttagggctaaccggggaagagaagattgatattggcgatctgcaaaacctacaacccggcgcgacggttccggtgacgcttacgcgcgcggatggtagccaggaagtcgtaccctgccgttgtcgtatcgacaccgcgacggagttgacctactaccagaacgacggcattttgcattatgtcattcgtaatatgttgaagtaacaactatttgcttgccggttattttgcttccggcaagcaaatgaattacacaatgcaagagggttatttgttcagcaaatggcccattttctcggctttggtatcgagataatgttcgttattggggttacgacctacaatcaatggtacgcgttcaacaatattaatccctgcttcggtcagaatttcgacttttttcgggttattggttaacaagcggacttcattgacgccaaggagtttgaacatatcagcgcaaagagtgaagtcgcgctcatcagcggcgaagcctaactggtggttagcctctacggtatcgtaaccttgatcctgcagtgcgtaagcgcggattttattcagcagaccaatgttacgaccttcctgacggtgatacagcaaaataccacggccttcctcggcaatttgcgtcaatgccgcttcgagctggaagccacaatcgcagcgcaagctgaacagggcgtcaccggtcagacattcggaatggacgcgcgcaagtaccggggtatgcccggaaatatcgccatagactagcgcgacatgatcgtgtccggttgccagttcttcaaatcccaccatcaggaaatcgccccatggggttggcagtttggcttctgccacacgtttaagctgcatgaaattctccagataatgctggttctgtattggcttattttgccataacgagaaggggttcacctaatcacgacgcgtcgatcgttcacggaatggcacaaatctgtcaatttttcctggaactggcgttttcagttatgattgtgggacttatcaaaaaggagaggccatgcgttcgattgccagacgtaccgcagtgggagctgcactattgcttgtcatgccagtagccgtatggatttctggctggcgttggcaacctggagaacaaagttggctactaaaagcggctttttgggttactgaaactgtcacccagccctggggcgtcattacacatttgattttattcggctggtttctctggtgtctgcgttttcgcattaaggctgcctttgtattatttgccattctggcggccgcaatccttgtgggacaaggcgttaaatcctggatcaaagacaaagtccaggaaccacgaccttttgttatctggctggaaaaaacacatcatattccggttgatgagttctacactttaaagcgagcagaacgcggaaatctagtgaaagaacagttggctgaagagaaaaatatcccacaatatttgcgttcacactggcagaaagagacggggtttgcctttccttccggtcacacgatgtttgctgccagttgggcactgctggccgttggtttgctgtggccgcgtcggcgaacgttaaccattgctatcttgctggtctgggcaacgggagtcatgggaagccgcctgctgctcgggatgcattggccacgcgatctggtagtagctacgttgatttcgtgggcgctggtggcggtggcaacgtggcttgcgcaacgaatttgtgggccattaacaccacctgcggaagaaaatcgcgaaatagcgcaacgagaacaagaaagttaacgctggttgattttccgaatttagcccttaaatcatcaacaatgcgtgtggatgccatttcgcagacggcgcgaaaatggtactttaaagggctattgcggtaagttgaccataatttattcgctctaaccacataacgggaagtaatgtgaaatatttactcattttcttactggtgttagcgatcttcgtgatttcggtcacgttgggtgcgcagaacgatcaacaggtgacgtttaattatctgttagcgcaaggggagtaccgtatttccacattgctggcggtattgtttgctgcggggtttgctatcggttggttgatttgtggcctgttctggctgcgagttcgtgtttccctggcgcgcgctgaacgtaaaataaagcgactggaaaaccagctttcacccgcgactgacgtggctgtagtgccgcactcgtcagcggcgaaggaataactttctatgctggagttgttgtttctgcttttgcctgtagccgctgcctatggctggtatatgggccgcagaagtgcgcaacaaaacaagcaagatgaagccaaccgcttgtcgcgtgattacgtagcgggggttaacttcctgcttagtaatcaacaggataaagcggtagacctgtttctcgatatgcttaaagaggatacaggcaccgttgaagcccaccttacgctcggaaacctgttccgttcgcgtggcgaagttgatcgcgctattcgcatccatcagaccctaatggaaagcgcctcgctgacctatgaacagcgtctgttggcgattcaacaactggggcgtgattacatggccgccgggttatatgaccgcgcggaagacatgttcaatcagctgaccgatgaaactgacttccgcattggcgcgctgcaacagttgctacaaatctaccaggctaccagtgagtggcagaaagcaattgatgttgccgaacgcctggtgaagctgggtaaagataaacagcgcgtcgaaattgcccatttctactgtgagttagccctgcagcatatggccagcgacgatctcgatcgtgccatgaccttgctaaaaaaaggggcggcggcagataaaaacagcgcccgcgtatccataatgatgggacgcgtgtttatggcgaaaggagaatacgccaaagccgtcgaaagtctgcaacgcgtgatatcccaggacagagaactggtcagcgaaacgctggaaatgttgcaaacctgctatcagcagttgggtaaaactgccgaatgggcagaattcctgcagcgtgcggtggaagagaacaccggtgccgatgctgaattgatgcttgctgatatcatcgaagcgcgcgacggtagtgaggccgcacaggtctatattacgcgccagcttcagcgtcatccgaccatgcgtgtgttccataagttaatggattaccacttaaatgaagcggaagaagggcgtgccaaagagagcctgatggtgctgcgtgacatggttggcgagaaggtacgtagtaagcctcgttatcgttgccagaaatgtggttttaccgcatacaccctctactggcattgtccgtcttgtcgggcctggtcaaccattaaaccgattcgcggtcttgatggcctgtaatttttaaaaaaaatccgactttagttacaacatactaattattaatgttccattgtgctccggcaacgacggcgcagaaaaagcctgccaggggagaaatcgcaactgttaattttttatttccacgggtagaatgctcgccgtttacctgtttcgcgccacttccggtgcccatcatcaagaaggtctggtcatgacgttaactgcttcatcttcttcccgcgctgttacgaattctcctgtggttgttgcccttgattatcataatcgtgatgacgcgctggcctttgtcgacaagatcgacccacgcgattgtcgtctgaaggtcggcaaagagatgtttacattgtttgggccacagtttgtgcgcgaacttcaacagcgtggttttgatatctttcttgacctgaaattccacgatatccccaacactgcagcgcacgctgtcgctgctgcagctgacttaggcgtgtggatggtgaatgttcatgcctctggtggggcgcgtatgatgaccgcagcgcgtgaggcactggttccgtttggcaaagatgcaccgcttttgattgctgtgacagtgttgaccagcatggaagccagcgacctggtcgatcttggcatgacactgtcacctgcagattatgcagaacgtctggcggcactgacgcaaaaatgtggccttgatggtgtggtgtgttctgctcaggaagctgtgcgctttaaacaggtattcggtcaggagttcaaactggttacgccgggcattcgtccgcaggggagtgaagctggtgaccagcgccgcattatgacgccagaacaggcgttgtcggctggtgttgattatatggtgattggtcgcccggtaacgcaatcggtagatccagcgcagacgctgaaagcgatcaacgcctctttacagcggagtgcatgatgagtgattccaacagccgtctggtctactcaacggaaaccggacgtattgatgagcccaaagcggcccctgtacgccctaaaggcgacggtgtggtgcgtattcagcgtcagaccagtggacgtaaaggtaagggcgtttgcctgattaccggtgtcgatctcgatgatgccgaactgacaaaacttgcagcggaactgaagaaaaaatgcggctgcggcggagcagttaaagatggagttattgaaatccagggcgataagcgtgatttattaaaatcactacttgaagcgaaagggatgaaggtaaaactcgcaggcggttaacataaaaagccacggatatatccgtggctttcgaatattttactgtgcgtattattcagttatttcgtactgaacagaatcaagcgtattataattgcgagtcgataatcgacatttatttacgattatttaccgacctggtgaccaataacacctccgacagctgcaccacctaatgtacccaacgtactgccatcggtcagtactgcaccgcctaatgcccctgcacccgcgccgattgcggtgttgcggtcccgtttagaccagttagaacaggcactcagagacattgccaaagtaattgccagaacagccgcggtcatttttttgctcgttacaaacataatactctctcctgaatttatgattcacggaagtaagctctctataactataatagctaagaataagtctggtgaaattattccgtgaaatctgctcgcgcgcagggttatatcacgcaggtgataatgacttcctgttatatcgctgataataattttatatcttgagagtgttaataacaggtaaatagtcttaattatcaaccaggaatcatcttagagcggatgatttgccaaactgcaaatcatccgtagagaagggaaatggttaaatgtcaacgacgtgaatggtgagtttactgtgctcaagatgcatcagatcgctggcgcgtattttcgaatcggtaatcacgcgattgaatcgctcaacgggaccgatggagtatgaatgtacagcaccaaatttcgagctgtcagtcaggactatcgcttcgcactctttttccagcacggcattgaccacatcggtacgcatcatatcgcgaccggtaaatccagtttcaggttgccagccatcaataccaataaatgctttgctgaaatgcacctgttggatgcactggcgtgtcaaagggccaaccatactttcgctttttttctgatacacgccaccgagcaaaataacttcacaaggcgcgtctttcagcaaatgcgcgatgtagctgctgaccgtgatgatagtgacatttttcttctgctcgcccagagtccgggcgagtagggcattgctgctgccattttcgataaagatggtttcgcccggttgaaccagcgacgcggcaaactcggcgagttcacgcttcagcgtatagttgctcatcatacgggtttcgacgtcatcactatcaagcgaaacagcaaagccatgtgcacggcggaggtaactcagtttttcgagtgtgttgagatcctggcgaatggtaacttcagaaactccagtggcttttgccagatcggttacgctaacctgaccctggtcaatgaccatctgtagaatagtttgttgtcgggaattcatcgctgtaattcttataacgttataatacttaataaaaaaatactgacgcgccgggcatcctcaaataggaaaacctgaaggcacgattgttaaatctcccacggtgccttcgggatgtctggcgtagattcagcaacctggcgcaagagttctgctttaagtatctcgagattatggatcgcagagtggtaatcgcctgccacaaggatatctaacacaatatcaatacgttcggcaacgcgctgggcatcaaattcagacatcaaggacatccttatagcaaaagggggaaaatgaataatgcaaaaattgccgctaaaagagaagtgtttaacagcaacggctaattatcatccaggaatacgatatataatgacgggatatagcgctaagtatatatattcatctacttatgcgcgcttcagatagcgtttataccagcgttcgaaggcgacggcgggcatcggtttggcaaacaaaaatccttgccgctcattgatcccgttcttggttaaaaaagcatcttcctttgcactctctacaccttcggcgatcacctgaagattcaatgcctgggccacagcgacgatcgcccggaccagtgactgcgagacaggttgtttgtgaatatctcgaacaaaaacctggtcaagtttgatggcatcgatcggaaagcgcgccagttgcgaaagtgaagagtagccggtaccaaaatcatccagatgcacttgcgcacctagttggctaaattgttgaataacagacagtgccagttcatcattctcaatcagacaactctctgtcagttcaacatctatagggcagtattcaaaattgagttcctggagaacctgtttcagggcggtgaaaatggtttgatcggcgagctgacgtgcagaaatatttaccgccactcgcaggtttatgcctttatcccgccactttgccacctggcgtacgacatcgagaatcacccaacggcctaaaggcacaattagccctgactcttcggcgtaggaaatgaagtccaacggtggaatcaacccacgttcaggtgactgccaacgtactagtgcttccagactgcgcacttcgccacgccaggtgattttcggttgatagtgaataaccaactgatcgttttccagtgctttacgcaagttggtatccagccagagatattcaaatacccgttgattcatttctggggtaaaaacgcaaaattgtcctcgtccgccttccttcgctgtgtacattgctgtgtcggcgtgacgaataatagccgtgctgtctgaaccatgttcgggagagagtgcaatacctactgaacagctggtataaacttcaattaaaccaatgcgaaaggggagccgtaagcgggtcaaaattcgtgatgccattgcttccagcgcgctttgtgaggtgttggatgccagtaccagaaactcatccccacctggacgcgccaacacctggtcatgttcgagacagcttaaaatagccaatgacacgtcgcgtaataactggtcaccaaacaaatgcccataggcgtcgttgacctttttgaaattatccaaatcaagatacacaaccccaactttattgttatctgcatgattaatagcgtgatcgattaaatcctgcattgcgttacgattcggcagtccggtgatactgtcggtatttgccagaatacgcagtcgctcctgagcgcggcgctcttcggtaatgtcggtgccggaacagattaaaaaaatctcgtttttgccactgccgctgtggacaaatttattgcgaaacagaaacagccgctggcctttacatgttggtatccacagttcgacttcatatgcattgccgcttcgaaaaaatacacggttattgcgcctggatgccgcagcttcacgacggctcataaacagtttaaacacgctttgcccaatgacgtcgtgttctttcaaccctgtgtaatcttcacataaccgattgaagcgttggatattcccccggctgtcgagaatcactattgcggaatgtgcttcagaaactacctgctcagcaaaggaaagcccgtgtgataaatcacgagcaaccgccggtgtgtcatgccatgcagacgcgttgccagcccattcccgtttattgatttttcgtcctaccagatgcacagaaagatcgctttcatcgacggtcagactcatcatcaggctggaggtgatgaccgtcatttccctgatgcgagcagcctgttcggcagataactgcaatgtacgatcaggttctgtggtttcggtggtagaaaagcgcaaaacatcgctgctttccgtcaaccgccagtatggattgtgcgatccgagaaagttgtacaacgttgtggactccctaacggttttcatgatgcatatcctccggttaacagcggagtccgcggttaaataaaaggaacaacatgacttacatgaaattaacggcggctaaacgcattgttttttttatatatttatttgtaatccagttttggaaaaacgccagttttcaaacgaaagtcagttaaaaaatctgcctggatataacgaaggtagagcggggaaataaacggcccatccatgaggaatgggccgtgaaaggagattacgcgaccgggcgcgcaataatgctgcgggtttccatgcggacttcggcaatagtgacgtcaataacgtcagtcactttgtaaaccgtttcacctttaatttgtacagtgccgttttcctggctgcaaaccagttcatcgcgcacagcgtgtaagaaaggtgccggaataaaggcgatagcgccgttatcaaccaaacgaacacgcatgccgccacggctgatatcgacaatttccgctgcgaaacgggtgtcggtcccggctttgtctttcaggaagcgtgcgtataaccagtcaccaacatcacgttctgccatccggttgagacggcgacgctcggccatttggacagtgatttcatcctgtgggcgcgtcgcagtttcgcctttgataaccgctttcagcagacggtggttgatcatgtcgccatatttacggatcggcgaagtccaggtggcgtatgcttccagaccgaggccaaagtgaggaccgggttcagtgctaatttcagcaaatgactggaagcgacgaatgcggctgtcgaggaaaccagttggttgcgcgtccagttcacgacgcagtttgcagaaaccgtccagcgtgagcacttcttcggcatcgacatgcagaccgtgcgttttcagcaacgctgccagcgcgtcggcattcgccggatcaaagcccatatgcacgttatagatgccaaaaccgagcttatcgcgcagtacgcgggccgcacaaatgttagcggcaatcatcgcttcttcgacgatacggttggcaatgcgacgaggctcggcgacgatatccagcacttcacctttttcaccgagaataaagcggtaatccgggcgatctttaaacaccagtgcgtggttatgacgccactcgccgcggcgttggcaaatttgcgctagcaaacggacttgttcggcaattgcttcactttcaggctgccagtcaccggtattttccagccagtcagaaacctggtcatacaccagctttgctttggattcgatggtggcggcaaagaattcgatattatcttcaatggtgccatcagcggagagcgtcatgcggcatgccagtaccgggcggacttcattggcgcgcagtgagcagagatcgtcagaaagctcgcgaggcagcatagggatgttgaagccaggcagatagttggtgaatgcgcgaattttcgcggctttgtccagcttgctgccttcagcaatccacgcggttggatcggcaatcgccacaatcagctgaagtttgtcatccggcaacgccttagcgaaaagggcgtcatccatatcttctgtgctggcactgtcgatggtgacaaaatccagcgcggtcagatcttcacgaaccagaccttcatcgagcatttcggtagcgacgccgtctggtgcttctttttccagattatggcgtgcaagggtaacccaccacggtacaaagtgatcgtcaccaaaagtgatgtattgtgtcagttctgcatagaaagaacgatcgcctttcagcggatgacggcgcatttcggcaaccgcccagtcgccttctttaaactcgtggttcaggccacgggctgcgcggcaaggaatggcgtcttttaagagtggatgatcaggaacgatggccagacggtcatttttgccctgaaccttacccacgaaacgagtcaggaacggttcaaccagttcttctggctctgcggattcacgttctttttcactgtggatcaccgcgataattcggtcgccatgcatgacttttttcatctgcggcggcggaatgaaataacttttttgcgcgtcgacttccaggaagccaaagcctttttctgtggcttttaccaccccttcagcgcgtggcgtctgggaatgcagttgctgtttaagctgcgctagcagcgggttgtcctgaaacataattgtctattttggtggccattagagcggctgacagttttacgcgaatctgtctgacgcggcaaggttaatatgtctcacccaacgcgatttttaagcgatttatccagccacacagcccgctccataccagcagattaataatctgcgttgatgatttttcgtgttcgagtaaagggctgaactgggcggcgctaaagcgatcgggtgctcgggtcagccattgtatcgcctgaacggtagcgcgctcaacagaatgacggtcagcccattggttaatttcattttcgcccttgcgcataagggtgctgatttttttatattcatttgatgaatccatacaggtggcaaaacaagcaggactgccatttatacgcgcgcataacaacgccgcaagctgattatccggctgtgtattgccccgtgtgctgtttaacaacttttcgagaagggaaagtgaaatagggtggagagagagtatttcggccagttggcaaagttctgcagttgaactttttgtgtgctcttcaggtagtttttccacctcatagctgcttcgccagcgtaatgattcatcagcaaacagtgacgcgtcggcgtagttttgtatctccagcccgggtaaccagcgtaccggatgcccgagataagcctgaaatgtcgcaattgtccgcgcctgaaagccaataaaaccaatgatttggctaatgatcacacagtcccaggcagtaagaccgacgtcattcagatgctggcgcgatcggttgtcgataatagaaggcgagctagccagttggcgggcatattgcgtgatttgtgccaaccgatgattactttccctggtggaatcaggcccggggagcggcgtaagtcgcgccgaatagtagttacataaccgctggacgccgcaaacctgagcaaccgtcagggccgtcgacaagcgttcataagcggtgaaggtctgtgaacgggtcacggtaagctggtcagggaacaaatccactgcaagaacacgcgcagggtccagccatgaaaggaagggggccagcgtttctttttcaaggatcacgtcgagtagaaagggatcgctgacctttgcggcttccgggaccagaggcagaacgtcatactccgtagtactggattgcgtttcatgataccagtggcttttgccggtgatgtggcgttgttccatgggcgctccttggtcgtaaaggaaatcgttatcctgacgcaaggcgggaaggggagaaagacggatcggcgataacaaatatcagaaaggtataacagagataacgggcggcagaacgccgcccatctttaccaacagaacgattatttcagttcgagttcgttcattgcagcaatgctgaaaccgccgtcaacgtggaccacttcaccggagataccggcagagagatcggagcacaggaatgccgcagagttacccacatcttcaatagtaacggtacggcgaatcggggtaacggcttcgcaatgagccagcattttgcggaagtctttgataccggaggccgccagagtacggatcggaccagcagagatggcgttaacacgcacaccttccggacccatcgcgttcgccatatagcgcacgttcgcttccagagacgcttttgccagacccataacgttgtagttcgggatagcgcgctcagcgccaaggtaggaaagggtcagcagggcagaacccggattcagcatggagcggcaagcttttgccattgcaacgaagctgtaggagctgatgtcgtgggcaattttgaagccttcacgggtaacggcgttaacatagtcaccatccagctgatcgccaggtgcaaaaccaatagagtgtacgaaaccgtcaaatttcggccaaactttccccagttcagcgaacatggtgtcgatgctggcatcttctgcaacatcgcactgcagaacgatgtcagaacccaattgagcggcaaattcttctacgcggcctttcagtttgtcgttctggtaggtgaatgccagttcagctccttcgcggtgcatcgcctgagcgataccgtaggcgatggatagtttgctggcaacaccggttaccagaatgcgcttaccggaaagaaaacccatagctttaatccttattgttgatgcttgttgtgcctgaaaatcaggcgattcgtcgttttagtaaacagtacgaacagataaacggttattataatcaacctggctgtgagtagctatagttgccaggtccgaccggagcaggctgcggcagggggggcgcttttcccctcaccctaaccctctccccagaggggcgaggggaccgtattgtgcaaatattgttaccccagcaacaaacaggctcatacagcccctaaccctttcatggcgatggctgggacggttcagaccttgccgaatattctccagcaccgtctccatgttttcaccacaacagctattcggctcggtctgccccctcgctctttcagggagagggtgaccggcggttcagttcctgcagaatattctccagcaccgtctcctcattacaatcaatctcgttattccagaaacgcagcacggtccagccctgcgactcaagccagctagtgcgcctggaatcataggcaactgctaaatcatgctgcccaccatccagctcaacgactacacgcgccgagcagcaagcaaaatcgagaatgtagctccccactggatgttgacggcgaaatttgaaatcactaaaacgtcggctgcgaagatatcgccagagctttcgttcctgcaaagtgagattgcgtcttaaatcacgcgcatttgatttaattttatctatcacctcattctgacaagatttaatcttttgtcagaatgaggtgaataatctggaaggaggattcagaaaattagcgatctttacgccacgcatccgccgtcaatgcctcgccaaaatgaccggcaatcagccgtttggtgagttcatgcagcggcgatgccagcacatccgcggtgctgcctcgctcgacaacctcgccctgatgcatcaccagcacctggtcgctaatgtgcttcatcattccgatatgctgggtaacataaatatacgaaatgccctgtttttcctgtaattccagcatcagattaatcaactgcgaacgcatcgacatatccagtgaagcgagggcttcatcggcaataatgacttttgggcgcaatatcagcgcgcgcgccagacccagacgctgtttttgtccgggtgccaacatatgcggatagtaactgacgtgatccggtagcagcccaaccatacgcatcgtttcaataatctgtttgcgacgctgttccggttccaggtcggtgttcaggcgcagtggaaaatccagaatttgcgagatacgttgacggggattcaacgaggtcgaaggatcctgaaaaatcatgcgaatacgctgactgcggaaggaataatcgccaaaatgcagtggatgatcgtcaatcaataactcgccgctggtaggctctatcattcccgccagcatttttgccagcgtggatttacccgaaccattctcgccaataatcgccagtgtctggccttcacgtagcgtaaagctcaagggttttaccgcttctacggtctgacgacgaaaccagccggtccggtagcggaacgttttacttaaattacgcacttcaagcagcgtttcgatcatctcactctttctccatgttcagcgggaaatgacaggcatagagatgatttttcgcccccgtcaaacgtggcgtcacaatgcattctcgttgtgcatacgggcaacgtggccccagacgacaaccaatcggtaactgttccagcagtgggatagcgccgggcagcgtattgaggcgacttttatgcggcatcgcgctgccgaagtctggtatcgcgcggatcagcgcctgggtataaggatgatgtggcatcgtcaccaactccttactcggcgcggtttccactgtttgaccgcagtaaagcacgttaattttatccgcccattggctaagcatttgtaagtcatggctgataagcaaaatagtggtattgctgttttggttgagacgcgtcagcaggcgaaagatttgcgcctgggttgttggctccattgagttggtcggttcgtcagcaatcagcagacgcggttgattcgccagtgcaatggctatcatcactttctgacattcaccttcggtcaactcatagggaaaactgcgcatcgcatctttgtgatctttaatccccacgcggtgcagcagttcaatggcacggcgtttgcgccagccaaaacgctgccaccaacggcctttataggtccaggctgggatgttttgcatcaactggcggcccacacgttctgaagggtcaagacacgactgcggttcctggaaaatcatcgacacgttatggccaaccagtttgcgccgttcgcgtgcggagagacgcagcaaatcgatatcatcaaaacgcatacggtcagcagtaacacgccagttatctttattcaccccacaaatcgctttcgcaatcaaactcttgccggaaccggattcaccaacaagaccgcggatttcaccttcggttaaggtcatacttacccggtcgacggctttaacccactcatcaccggttttaaattcaatggtcaggttacgaatatcgagtaatggcattattccacccccgcaataatcgcacgacgaacgccatcgccaaggaggttaaccaacaacacgctaatcataattgccgcacctggcagcatgacagtccacggggcgacataaatcagttccagcgcatcaccgagcatcgctccccattcaggcgaggggagttgtgcgccgagatcgagaaagcccagcgcggcgatatcgagaattgccatcgacagtgcgcgggtgatctcggtgaccagcccggcggtgatgtttggcatcacagcaaaccagagaatattcagcgttgatgcgccatccagacgggcggcgataacgtactctttttccagttcgtcatgcaccatgctgtaaatcgaacgtaccatacgcggcagcaatgccagccagacagcaaacatagcgtgggacaaactcggtccggcaaacgctacaacgataattgccaacagcagcgaagggatcgccagtaaggtatccagaatatggttaagcaccgctgagcggaggccgtgtgtcgccccggcgaaggtgcccagtaccaggccacagatcgtcgcggcaagcgtcaccacaaatgcgccacccacggttggcgcagctccgctcagtaaacggcttaaaacatcgcgtccgaggtcgtcagtccccaggaagaaagaaacttcgccatagcgcgaccatgacggcggcaataattgataaccgagaaattgctggtcgatgccgtaaggcgcaaaccagccgccaaaaatacacagtacagccagccccgcgcagccgtacaggccgaccatcgcagaggcgtcactataaaatttgcgccaggcggtacgcagcgtgcccggcgggcgcttttcgctgtatacgctatcgtaaggcataccattccttatgtttcagagggttagccatggcacccaaaatatcagaaatcacgttaacaataatgaccagtgagccacacaccatcactccggcggaaatggctgcgtaatcctgctggcggatggcgttaattaaccagcgccctaaacccggccagctaaaaaccatttcggtgatcatcgccagcgtcagcatggtggaaaactgtaagcccaggcgaggaataaccggcggtaacgcgttatgcagaacgtggcgacgcaaaatagtaaagcgcgacaaaccgcgggtcgccgccgcttttacatagttctggtcatacacttcgatagtgctgatacgcatcaggcggatcacttcagttgttggcgcaaccgacagggtgatcacgggcaatatcatatggcggattgcgctcatgatcatttcatcccgccatggtgagtccgaaagccaggcatcaatcaacgcaaaaccggtaatcggtttcacttcgtagagcagatcgaaacgccctgaaacgggcaaccaacctagcgtgagtgaacaaaacagcgtcaacagaagcgccagccagaacaccgggattgaaaagcccagtaaggcgatggcgttgatcaagttatcctgccacttatggcgcgtaatcccggcaatcatccccacggggatgccaacaatcagcgcaaaaccgaaggcgaggatgcacagttccatcgtcgccgggaagacctcttttaactgttcggcaatcggttgaccgttaatgctggaaacaccaaaatcccagtggatcaggccgttaaaccagaacacccaggcattccacagtgacgcgccttgtaacggcgcatgaggggtgaaatagctcaagctgaagccaacgaaggtcagcaggaacaaggtgacaatcaataacaaaatgcggcgtaaggtgaagataatcatggttttttcacctcatcctgtttctcgcgatacaccccagcaaaggaggcgttaccaaacgggctaagtaccagacctttgatatcgtaccgataggcctgcaaacgcaatgacgacgccagcggcaaaatgggcaattcctgcgccagaatactctgcgcttcgtcataggcttcaatacgcgccgccagctgctgcgaagagagcgccttacgcaatacgctgtcgaatttcggatcgcaccagtgggcgaggttggtctgcgaatgaattgccgcgcagctcagtaacggacggaagaaactgtccgggtcgttactgtccgtcgcccaaccggataacgtcagatcatggctcatatccatcaaccgcgcctcctgaaagcgaccttctaccggcacaatcaccacttttacgccaacctgcgccatatccgcctgaatcagttcggcagttttcagtggactggggttccacgcctgcgaacgtgtgggcacccacagtttcagcgttaaattttccagccccaacgacttcaactgttcgcgcgatttcgccggattgtattcagtaattttagcctcgttgtcataggcccacgaggcgcgcggtaaaatagaggccgccgtttcagccgtaccataatagatggattgcatcaggcgctggttattaatcgccagtgccagcgcatggcggacagcgggattatttagcggcggtttggcggtgttaaatgccagataggcgacgttcatcccaggacgcagcgttaaacgcaagcgcgggtcgtcacgcaaaatggatagctggctggcagcaggccaggccagaacgtcgcattccccggtcaggagtttcgacagacgtccggtgccgccggagcctaaatccaccactacctgcggcattaacggtttaccgcgccagaagtcatcatgacgttgtaggcgaataaattgcccggcgcggtattccgacaactgatacggaccggtgccgaccggttgacggtcgagttgctcctggcgatcttctttctctaacttccgggcatattctgccgacatgaccgaagcataatgggttgcgaggtgccacaaaaaagaagcatccggctgggcgagtcggaactcaacggtatgattatccagtttgcggacgcttttcacgttatcggcaaattgcaggctgtcgaagtaggggaagttgctgccgttgacgttatgccacgggttgttgcggtcaaaaattcgctggaaggtaaacaccacatcgtcggcattcattttacgagtgggagtaaaccagtcggttttttgaaacggaacatcgcgacgcaggtggaagcgataggtcgcgccgttgtcgagtacttcccagctttcggcaagttccggcatcaggcgataggtatagggatcgacatccagcagtcgatcataaaactgggcggcaagggtatcgacaattaacccactgctcgctttggatgggttaaaggtgttgacttgcccgctgacgcaatagacaaaaccgctgtcgcggatatcagcatgcgggggagattcaggcgcggcgattgcctgaccactcacaagtccagcaatcaccaaaagagacgataatacctggcgcataatattaagggattttatgtaaagaggctatcttactaatatttaatgacatttgccattaccgtttgtgttcaggggtcgtaatgagggccgtgtggttggtcgttgaacaggtgacgtcgccatctgttcaacattcgtacccgtgatttctctataactataactcacagaacaacttagcgaggagcagagcggtacgatcgtgagaaacccattaaagcacgctgcagtgcgtgtcattgttagccagatgcggcgtgaacgctttatccggacaacgatactgaccgatcgtctgcaattaaatcattactcattaccccattgattcaaaaactctgcgatctcatcaatgcgtacgggattaatccccgcttcagcagccatttcatgttgggcttcttcgctgatctcttcattgttcatcaaacgggtgagcagtaactggaagtagtgggccagcggtgtgcgttcagcctctgcgacaggctctgcgcattcggtcgcgtactcatcggcaatatcaaaatattttagcgggatatcgtggttcattatttgcccctggggttaatgcgctaagcataagggcggatgatagcactcgtgatccgggtcatacatctttttatagttaatggcgcggcgcgttaccctcaggcaggataatgcgccgcgcatccgactattacgtttcactcaccggcgttctgtcaccatcatacaacggcactttgcgatagcggcggatcagataccataaatatgcgccgcctaacgaagcccataccagaccgagtgtcagtgacgttgactcgaggttaacccacagcacacccaccgtcagcgcgccaaccagcggcatcagcaaatagtggaagtgatccttccagcttttattcattcctttacgccgccagaaatgattaaacaccgacagattcacgaaggtaaacgccaccagagcaccgaagttaattaacgctgtggcggtaactaaatcgaagaacagcgccgacaacgcgacaatcccgaccataatgacgttgagtgccggagtccgccattttgggtgcacatagccaaacacgcgctccggaaacacattgtcacgccccatcacatacagcagacgcgacacgctggcatgtgaagccaggccagaggctaacgtgttcacaaacgtggtgcagaggaaaatcgactggaagagcttgccgccgacgtacagcgcaatttcaggcagtgcggcatccggatctttaaagcggctgatatcgggaaagaacagctgcataaagaacgacgccgcgataaagataacgccaccgtagaccgccgtcaggaagatggctttcgggatcacgcgtgcggcgtccggcgtctcttccgaaagcgtggtcaccgcatcgaaaccgaggaaggagaaacagacaatcgtcgccccggtaataatcgggatcaggtgcgcgttctcgctgataaacggctgaagtgaccagacggtgccaacgccttctcctttatgcagtccctgaactaccaggaagataaacaccaccatgatggagatttgcaccagtacaaacagggtattgaagttagcgaccaggttgacgctcttcagattcgcggcggttaaaatggcgacgaaggttaccacccacacccacggcggcacttccgggaagagggcggagagatagattttcgccaacaagacgttaatcatcggcaaaaagagataatccagcagcgatgaccagccgaccataaatccgacgtgcgggttaatcgacttttgcgcgtaggtataggccgaaccggcctccggaaactggcgaaccagtttgccgtagctgatagcggtaaacagcacacccgccagcgccagcaaataggacgccggaacgtgaccgtcgctaatgccggagacaataccaaaagtatcaaatacggtcatcggcgtgagataggccagacccatcatcaccacctgccacaatttcagtgattttcgcagacgggttttgccgggttgcgcagcaatattcagtggtgaattaatagccataattgctgcctcccctgcgtaataaggtttgcggtcgtgtcgacctgaaatcaaacctgtttagcaagggaagcaaagggggcggagtccagtcagtagcaggaggggcgcatacgcagcctccctcgccatgcggggatttaatcatcggcatcatctcatttcctcgtcacagtcttaatcgttaacggaagcccgttgccgcccgcgctccataacgcgacatccgggaaatgtctggattaccagcaaatgtcaggcctggctccgctcaggccgatgaaacaaccccgcaaggggtattacgcgtttttcaacatccactcaatttctgtttctgtgatgaggcgctcaaactgcaacagctcatcatttttacaggcgtgatagacatggcagaagcgttcgcctaaatagcggcgcaggtgatcattctcgataaactcacccagggcatcgctctggcgaatcggaaagggtaagccttcctgttccagcccgttgccttcgacttcttcctgcaacggcagctcgttatcaaggccatgcaaaataccggcaaaaatcgctgccatcaccagatatgggttggcatcggcacccgccacgcgatattccacgcggtgattatgacggtcgccgcacggaatacgcagggcgacggtgcggttgttatggccccacgacgcctgcgtcggcacatacattcccggctggaagcggcgatacgagttcacgtttggtgccagcaacgccatcgacgacggcatcaggtcaatcatcccggcgagcatctttttcagcagcggcgaatcttcgccttccgcgtcagaaagcacgttctcgccacgattattttgcatactgatatggatatgcattccgctgcccgcgtgctcttcatacggcttcgccataaaagtggcgtgcatcttatgcttttctgccatcagacgcaccaggcgttttagtgccagcgcatcatcgcaggcttccagcacgttatcagtatggtaaaggttgatttcaaactgacccggcgaggcctcagcgaccgcgccatctgccggaatcagctgtaactgcgccagttcatcaatatcattgagcacgtcggcgaagtggttgaggttatcaacggagtaaacctggctttgtgtattgcggtcatcggtgccaggcgcgcagggcggttgcagatacccttcagcgtcgcgctggcgatccagtaaatagaactccagctctaccgctacgaccgggaacaatccgcgctggcgcagctgctgccacaggcggttaagaacgttccgcggctcaacgtcaaagggagcgccatcttcatcgaccatggtcaggagcatctgaccgataaactctggatcggcggcagaaggagttaaggaaccgagaacaggaacacaggtacgatccggctcgcccatttcctgacccagacctgcttcttctactacgttgcccagaatatccattgcaaataccgaggccgggaaataacaccctttctcgagcttcttcaggcttgaaacaggaatacgctttccacggaagcaaccatttaaatcggtaagtaaaacatcaacatattgcgtattcgggtagcgctccaggtagcgtttcacttcctgcgtaaaggcgctaccccgcctctcttctgactgctgaacaaagttctctacttcaacgatattggtttccatgattcttcgcctttggtttgttttccgctcgttatcaaagcgtaaaatataatgaccaccattcgaatctgtatgcaaactaaatgtttgtcaaatgttaaattgagtttgcaaaaatgaaaacccactgctagattgaaaaaatattgaacataaaggtcatttaaagcgcagtaatggcgataatttagtccactttgtgagattgagcatggaaaatataatgaacaatccggttatcggtgtcgtaatgtgcaggaacaggcttaagggtcatgcgacccagactctgcaagaaaagtacctgaatgccatcatccatgcaggcggcttgcctattgcgctaccacatgcgctggcggaaccgtcattacttgaacaacttttgccgaaactcgatggcatttatcttcctggtagtcccagcaatgtgcagccgcacctatatggtgaaaacggcgatgagcctgacgccgatcccgggcgtgatcttctgagcatggcgataattaatgccgcactcgaaaggcgcatccccattttcgccatctgccggggtttacaagaactggtggtggcaaccggtggttcgttgcatcgcaagctgtgcgaacagcctgaattgctggaacatcgggaagatcccgaactgccggtggaacagcaatatgcaccgtcgcatgaagttcaggttgaagaggggggattactgtctgcgttgttacctgaatgtagcaacttttgggtaaactctctacatggacaaggggcgaaggtcgttagcccacggttgcgtgttgaagctcgctcgccggatggcttagttgaggcggttagcgtcatcaatcatccttttgcgctgggcgtacagtggcacccggaatggaacagtagcgagtacgcgctttcgcgtatattgttcgagggctttatcaccgcttgtcagcaccatatcgctgaaaaacagcgactctgaccactacagtttaaggaaatgcaaatatgagtgatgagggactggcgccaggaaaacgcttgtcggaaatccgccagcagcaggggctttcacaacgtcgtgccgccgaactctccgggctgactcacagtgctatcagtacgatagaacaagataaagtcagccctgccatcagtacgctgcaaaagctgctgaaggtgtatggtctgtcactctcggaattcttttccgagccggaaaaacctgatgagccgcaggtcgtcattaatcaggacgacttaattgagatgggtagtcagggtgtgtcaatgaagctggttcataacggtaacccgaatcgcacgctggcgatgatctttgaaacgtaccagccgggcacaaccactggggaaagaattaagcatcagggtgaggaaataggcactgtactggaaggtgaaattgttctgacgattaatggtcaggattaccacctcgtcgcggggcaaagttatgccattaataccggcatcccgcacagtttcagtaatacgtcggcaggtatttgccgaattatcagcgcccatacgcccaccacgttttaatctttttgttctgtaagccgggtaagcgcaatgcgcccggcaatctatacacaaaatcattcaagttgcatcaaggcggcaagtgagcgaatcccgatgagcttactcaggtaagtgattcgggggagcgaacgcagccaaggcagaggcggcttgaaggatgaagtgtatataaagaatgtcgccagaaataaacgggcatacggcccggggatctctgcgccctgacgttcacaaactgcatatatctgatagacgtgaaacaggagtcataatgaattttcatcatctggcttactggcaggataaagcgttaagtctcgccattgaaaaccgcttatttattaacggtgaatatactgctgcggcggaaaatgaaacctttgaaaccgttgatccggtcacccaggcaccgctggcgaaaattgcccgcggcaagagcgtcgatatcgaccgtgcgatgagcgcagcacgcggcgtatttgaacgcggcgactggtcactctcttctccggctaaacgtaaagcggtactgaataaactcgccgatttaatggaagcccacgccgaagagctggcactgctggaaactctcgacaccggcaaaccgattcgtcacagtctgcgtgatgatattcccggcgcggcgcgcgccattcgctggtacgccgaagcgatcgacaaagtgtatggcgaagtggcgaccaccagtagccatgagctggcgatgatcgtgcgtgaaccggtcggcgtgattgccgccatcgtgccgtggaacttcccgctgttgctgacttgctggaaactcggcccggcgctggcggcgggaaacagcgtgattctaaaaccgtctgaaaaatcaccgctcagtgcgattcgtctcgcggggctggcgaaagaagcaggcttgccggatggtgtgttgaacgtggtgacgggttttggtcatgaagccgggcaggcgctgtcgcgtcataacgatatcgacgccattgcctttaccggttcaacccgtaccgggaaacagctgctgaaagatgcgggcgacagcaacatgaaacgcgtctggctggaagcgggcggcaaaagcgccaacatcgttttcgctgactgcccggatttgcaacaggcggcaagcgccaccgcagcaggcattttctacaaccagggacaggtgtgcatcgccggaacgcgcctgttgctggaagagagcatcgccgatgaattcttagccctgttaaaacagcaggcgcaaaactggcagccgggccatccacttgatcccgcaaccaccatgggcaccttaatcgactgcgcccacgccgactcggtccatagctttattcgggaaggcgaaagcaaagggcaactgttgttggatggccgtaacgccgggctggctgccgccatcggcccgaccatctttgtggatgtggacccgaatgcgtccttaagtcgcgaagagattttcggtccggtgctggtggtcacgcgtttcacatcagaagaacaggcgctacagcttgccaacgacagccagtacggccttggcgcggcggtatggacgcgcgacctctcccgcgcgcaccgcatgagccgacgcctgaaagccggttccgtcttcgtcaataactacaacgacggcgatatgaccgtgccgtttggcggctataagcagagcggcaacggtcgcgacaaatccctgcatgcccttgaaaaattcactgaactgaaaaccatctggataagcctggaggcctgaaatgaccgaacataccagcagttactacgccgccagtgcgaataaatatgcaccattcgacacgctgaatgagtcaatcacctgcgacgtttgcgtggttggcggcggctataccgggctctcctccgcgctgcatctggcggaagcgggctttgacgtagtggttctcgaagcctcacgcatcggctttggcgcaagcgggcgcaatggcggacagcttgtgaactcctacagccgcgacatcgacgtgatcgaaaaaagctacggcatggacaccgcccgtatgctcggcagcatgatgttcgaaggtggtgagatcatccgcgaacgtatcaaacgttatcagattgactgcgactaccgccccggcggcctgtttgtggcgatgaatgataaacagctcgccacacttgaagagcagaaagagaactgggaacgctacggcaataaacagctggaattgctggacgccaacgccattcgccgtgaagtagccagcgatcgctataccggtgcgctgctggatcacagcggtgggcatattcatccgctaaaccttgccattggcgaagcggacgccatccgcctcaacggcgggcgcgtgtatgaactttctgccgtgacgcagatccagcacaccacgccagccgttgtgcgaactgccaaaggtcaggtgacggcgaagtatgtgattgtcgccgggaatgcgtatctgggcgataaagtagagccggaactggcgaaacgcagcatgccgtgcggcacgcaggtgatcaccaccgaacggctgtcggaagatttagcccgttcgctgatcccgaaaaactactgtgtggaagactgtaactatctgcttgattactaccgtcttaccgccgacaaccgcctgctgtacggcggcggcgtggtctacggcgcgcgcgacccggatgacgttgagcgccttgtggtgccgaaactgctgaaaaccttcccgcagctgaagggcgtgaaaattgattaccgctggacgggcaacttcctgctgaccctgtcgcgtatgccgcagtttggtcgcctcgataccaacatctattacatgcagggctacagcggccacggcgtgacctgtactcatctagccggacgtttgattgccgaactgctgcgcggcgacgccgaacgtttcgatgccttcgccaatctgccgcattacccgttccccggcgggcgcacgctgcgtgtgccgtttaccgcgatgggcgcggcgtattacagcctgcgcgatcgtctgggcgtttaatttccgattaaccgtgaagagtcaaaaggtgtgaaacatgagcaacaatgaattccatcagcgtcgtctttctgccactccgcgcggggttggcgtgatgtgtaacttcttcgcccagtcggctgaaaacgccacgctgaaggatgttgagggcaacgagtacatcgatttcgccgcaggcattgcggtgctgaataccggacatcgccaccctgatctggtcgcggcggtggagcagcaactgcaacagtttacccacaccgcgtatcagattgtgccgtatgaaagctacgtcaccctggcggagaaaatcaacgcccttgccccggtgagcgggcaggccaaaaccgcgttcttcaccaccggtgcggaagcggtggaaaacgcggtgaaaattgctcgcgcccataccggacgccctggcgtgattgcgtttagcggcggctttcacggtcgtacgtatatgaccatggcgctgaccggaaaagttgcgccgtacaaaatcggcttcggcccgttccctggttcggtgtatcacgtaccttatccgtcagatttacacggcatttcaacacaggactccctcgacgccatcgaacgcttgtttaaatcagacatcgaagcgaagcaggtggcggcgattattttcgaaccggtgcagggcgagggcggtttcaacgttgcgccaaaagagctggttgccgctattcgccgcctgtgcgacgagcacggtattgtgatgattgctgatgaagtgcaaagcggctttgcgcgtaccggtaagctgtttgccatggatcattacgccgataagccggatttaatgacgatggcgaaaagcctcgcgggcgggatgccgctttcgggcgtggtcggtaacgcgaatattatggacgcacccgcgccgggcgggcttggcggcacctacgccggtaacccgctggcggtggctgccgcgcacgcggtgctcaacattatcgacaaagaatcactctgcgaacgcgcgaatcaactgggccagcgtctcaaaaacacgttgattgatgccaaagaaagcgttccggccattgctgcggtacgcggcctggggtcgatgattgcggtagagtttaacgatccgcaaacgggcgagccgtcagcggcgattgcacagaaaatccagcaacgcgcgctggcgcaggggctgctcctgctgacctgtggcgcatacggcaacgtgattcgcttcctgtatccgctgaccatcccggatgcgcaattcgatgcggcaatgaaaattttgcaggatgcgctgagcgattaatagcccaacgcaataatgtctgatgcgctgcgcttatcaggcctgcaaacgacgtattgattatgtatgccgaataaagcattcacgccgcatccggcaagttgtattgctcaacttcgctaaatctggtgctttttcaacaacgcgcggaactgatgataagttaaccccagtaattcagccgcgcgcttctggttatatttcccttgttgcaaactgagttgcagcaactctttttcctgctgcatctgaaactcacgtaaatccagcggcagtgttggaagcgaggtggtttctgaaacggcgatagcgtcttcaggcggacgccgtttaaagggatcaataatgatgtcatcaagcggataatcgctggtgccgtggcgatacactgaacgttccaccacgtttttcaattcacgaatatttcccggccaacgataattcagcaatgtttctctggcgcgctccgtaaaccccgggaacagaggcagcttgatttcccgacacatctggatggcaaagtattctgccatcaacattatgtcgctttcgcgctcgcgcagtggtggcagttgtacaacatcaaaagccagtcggtcgagcaggtcagcgcgaaaagtgccttcattgaccatcgccgggagatcggcattcgtcgcgcataccaaccgcacattcacctgcaatggttggctgccgccaacgcgctccagttcaccgtactcaatcacgcgcaataatttctcctgcaccatcatcggtgccgtagcgagttcatcaagaaatagcgtaccgccgtcggcacgttcaaatctccctggatgacgtttttgcgcaccggtaaacgcccccgcttcgtgaccaaacagttcggaatccagcagattttcatttaacgccgcgcagttaagggaaataaacggcccttgccaacgggaggagagataatgcaggcggctggcaatcagctctttaccggtgccgcgttcgccgatgatgagcaccggtttgtccagcggtgcgagatgcgaaacctgttccagcacttcgagaaagctgttcgcctcaccaagtaaattatctttgtattctgccatgatgaaattcgccacttgttagtgtaattcgctaactcatcctggcatgttgctgttgattcttcaatcagatctttataaatcaaaaagataaaaaattggcacgcaaattgtattaacagttcagcaggacaatcctgaacgcagaaatcaagaggacaacattatgggtattttttctcgctttgccgacatcgtgaatgccaacatcaacgctctgttagagaaagcggaagatccacagaaactggttcgtctgatgatccaggagatggaagatacactggttgaagtacgttctacttcggcgcgcgcgttggcagaaaagaaacagctgactcgccgtattgaacaagcgtcggcgcgtgaggttgaatggcaggaaaaagccgaactggcgctgctgaaagagagagaggatctggcacgtgcagcgttaattgaaaaacagaaactgaccgatctgattaagtccctggaacatgaagtgacgctggtggacgatacgctggcacgcatgaagaaagagattggcgagctggaaaacaaattgagcgaaacacgcgctcgccagcaggcattgatgttacgtcatcaggcggcaaactcgtcgcgcgatgtgcgtcgtcagctggacagtggcaaactggatgaagcaatggctcgtttcgaatctttcgaacgtcgtattgaccagatggaagcggaagcagaaagccacagcttcggtaaacaaaaatcgctggacgatcagtttgccgaactgaaagccgatgatgcaatcagcgaacaactggcacaattaaaagccaaaatgaagcaagacaatcaataataacatccaggcggcgtccgaacgcgccgccgctcatcgtctaaggagtacttatgagcgcgctatttctggctattccgttaaccatttttgtgctgtttgttttaccgatctggttatggctgcattacagcaatcgttctggtcgcagtgaattgtcgcaaagtgagcagcagcgattagcgcaactggctgatgaagcaaaacggatgcgcgaacgtattcaggcgctggaatctattcttgatgcagaacatccgaactggagggatcgctaatggcgggcattaatctcaataaaaaattatggcgtattccacagcagggcatggtccgcggcgtctgcgccgggattgccaactattttgatgtaccggtaaaactggtgcgtatcctggtggtgctgtcgattttcttcggtctggcgctgtttaccctggttgcttacatcattttgtcatttgcgcttgatccaatgccggacaacatggcctttggtgagcagctaccttccagcagcgaattgctggatgaagtcgaccgtgaactggcggcaagtgaaacgcgtttacgcgagatggaacgttatgtcacttccgatactttcacgttacgtagccgtttccgtcaactgtgaggaaagttatgaatactcgctggcaacaggccgggcaaaaggtaaagcctggtttcaaattagcaggcaagctggtacttcttaccgcactgcgctatggcccggcgggtgtggcgggctgggcgataaaatcagttgctcgccgaccgctgaaaatgttgctggctgtggcgctggaaccgctgttaagtcgggctgctaataaactggcacagcgttataaaaggtgaggggagtttcgcaaaaattgttaaatctcaggcgtataatggatggcaattttcatccatagaaggacgcttacatgtttaaaaaaggcttacttgctctggcactggtgttttcactgcccgttttcgccgctgaacactggatcgatgttcgtgttccagagcagtatcagcaagagcacgttcagggggccatcaatattcccctgaaggaagtgaaagagcgcattgccaccgccgttccggataaaaacgacaccgtgaaagtgtattgcaatgccggacgccagtcagggcaagcaaaagagatccttagcgagatgggatatacccacgttgagaacgccggtggcctgaaagacatcgcaatgccgaaggtcaaaggttaaaagaattcaccatgagcggcgcttatgcgccgtttttttttctgtcacaccttatttacatccccatagattatttgcgtcagctcacaaatacgctttttccctggtaaaaaatgatttcctgcgtgactaaaacccttgtgctcaattgacagtttattttctgcggagtagtctctcgtttcatgggaccgctaccacggaaaggcaacatgaaacagaaaattacggattacctggacgaaatctacggtggaacatttaccgcaactcatttacagaaacttgtaacgcgtcttgagagtgcgaaacgattaattacacagcgacgtaaaaaacactgggatgaaagtgatgtcgtgttaattacctatgccgatcaatttcacagcaatgatttaaaaccattacccacatttaatcagttttaccatcaatggctgcaaagcattttttcacatgttcatttgttgccgttttatccatggtcatctgatgatggcttttcggtaattgattatcatcaggtcgccagtgaagcgggggagtggcaggatattcagcaactcggtgaatgcagtcatttaatgtttgattttgtctgcaaccatatgtcggcaaaaagtgaatggtttaaaaactatttacaacagcatccaggttttgaagatttttttattgccgttgacccgcaaaccgatctcagcgccgtcactcgcccgcgtgcgttaccgttattaacgccattccagatgcgcgatcattcaacgcgccatttatggaccacctttagtgacgatcaaattgacctgaattaccgtagccctgaagtgttgctggcgatggtggatgttttactctgttaccttgcgaaaggtgctgagtatgtccgcctggatgccgttggctttatgtggaaagagccgggaacaagctgcatccatctggaaaaaacacatctgattatcaaactgttacggtcgattattgataacgttgcgccaggtacagtgatcattaccgagaccaatgttccgcataaagacaacattgcttactttggcgcaggcgatgacgaagcacatatggtgtaccagttctcgctgccgccactggtgctgcatgcggtgcaaaaacagaacgttgaggcgctttgtgcgtgggcgcaaaacctgacactaccttccagcaacaccacctggtttaacttcctcgcctctcacgatggcatcgggctaaacccgctacggggcttgttgcctgaaagcgaaatattagagctggtcgaggcgttacagcaggaaggtgcattagtaaactggaaaaataatcccgacggtacacgcagtccgtatgaaataaatgtgacctatatggatgcgttaagccgccgtgagagtagcgatgaagaacgttgcgccaggtttatccttgcccatgcgattttgttaagtttccccggtgtgccagcgatatatattcaaagtattcttggctcgcgtaatgattacgcaggtgtcgaaaaactcggatataaccgtgcgattaaccgtaaaaaatatcacagtaaagagataacccgagaactgaacgatgaagctacattaaggcatgcggtatatcatgagttgtcgcgtttaattacacttcgtcgcagccataacgagtttcatccggataataattttaccattgatacgattaattcatccgtaatgcgtattccaagaagtaacgctgatggtaattgtctgactggattgtttaatgtcagtaaaaatattcagcatgtaaatattactaatctgcatggtcgggatctgattagtgaagttgatatattgggtaatgaaataacgctgcgcccctggcaggttatgtggattaaataaaaaggaacatctcatgattaaatcaaaaatcgtgctgttatcagcactggtttcatgcgccctgatttcaggctgtaaagaagaaaataaaacgaatgtatccatcgaatttatgcattcttcggtggagcaggagcgccaggccgttatcagtaaattgattgcccgttttgaaaaagaaaaccctggcatcaccgttaagcaagtgcccgtggaagaagatgcctataacactaaagtcattactctttcacgtagcggttcgctgccggaagtgatcgaaaccagccatgactacgccaaagtgatggacaaagagcagcttatcgatcgcaaagcggttgccacagtcatcagcaacgttggtgaaggcgcgttttacgatggcgtactgcgtattgtgcgtaccgaagatggtagcgcatggaccggtgttcctgtcagcgcctggattggcggtatctggtatcgcaaagatgtgctggcaaaagcggggcttgaggagccgaaaaactggcaacagctgctggacgttgcacagaaactgaatgacccggcgaataaaaaatacggcattgcgctgcctacagcagaaagcgtgttgacggaacaatccttctcccagtttgcgttatccaaccaggctaacgtctttaacgccgaaggcaaaatcacccttgatacaccagagatgatgcaggcactgacctattaccgcgaccttactgccaacactatgccgggttctaacgacatcatggaagtgaaagacgcctttatgaacggcaccgcgccgatggcgatttactccacctatatccttccggctgtgattaaagaaggcgacccgaaaaacgtcggtttcgtggtgccaaccgagaaaaactctgcggtctacggcatgttgacctcgctgaccattaccgccgggcaaaagaccgaagagacggaagcagcagaaaaatttgtcacctttatggagcaggcagacaacattgccgactgggtgatgatgtcgccaggtgctgcgctgccggtgaataaagcggtggtgactaccgccacctggaaagacaacgacgttattaaggcgctgggtgaactaccgaatcagctaatcggtgaactgccaaatattcaggtttttggcgcagtaggggataaaaactttacccgcatgggtgatgtgacgggttctggcgtggtgagttcaatggtgcataacgtcaccgtgggtaaagccgatctctctactacgctgcaagcgagccagaaaaaactggatgaactgatcgaacagcactaaacccaggacaggaatccgcaatgaacaggcttttttcaggtcgttccgatatgccctttgcgctgctgcttctcgcgcccagcttattactgctgggcggtctggtggcgtggccgatggtgtcgaatatcgaaatcagttttttacgtctgccgctcaatcccaacatcgagtcaacgtttgttggggtgagcaactatgtgcgtatcctctccgatcccggcttctggcattcgctgtggatgacggtctggtataccgcgctggtggtggcgggcagcaccgtgctcgggctggcggtggcgatgtttttcaaccgcgagttccgcctgcgcaaaaccgcgcgttcgctggtgatcctctcctacgtaacgccgtccatttcgctggtgttcgcctggaaatacatgttcaacaacggctacggcattgttaactacctcggcgtcgatcttctgcatctctatgagcaggcaccgctgtggttcgataatccgggcagtagctttgtgctggtggtgctgttcgccatctggcgctacttcccgtatgcctttatctcgtttctggcgattttgcagaccatcgacaaatcgctgtacgaagcggcagagatggatggcgctaatgcctggcaacggtttcgtatcgtcacgctgcccgcaattatgccggtcctggcgacggtggtgacactgcgcaccatctggatgttctacatgttcgcggatgtttatttgctgacgaccaaggtcgatattctcggtgtatatctctacaaaaccgcctttgcctttaatgatttaggaaaagcggcggcgatctcggtggtgctcttcatcattattttcgctgtcattctgctgaccaggaaacgggtgaacctcaatggcaacaaataaacgcacactcagtcgcatcggtttttactgcgggctggcgctgtttctcatcatcacgctgtttccattttttgtgatgctgatgacctcgttcaagggcgcgaaagaggcgatctcactgcatcctacgctgctgccgcagcagtggacgctggagcattacgtcgacatttttaacccgatgattttcccgtttgtcgactacttccgtaacagtctggtggtgtctgtggtttcatccgtggtggcggtattcctcggcattcttggggcttacgcgctttcccgcctgcgctttaaaggtcggatgaccatcaacgccagcttttacacggtgtatatgttctctggcattttgctggtggtgccgcttttcaaaatcatcaccgcgcttggcatttacgacactgagatggcgctgatcatcaccatggtgacgcaaactctgcccaccgccgtgtttatgctgaaaagctacttcgacaccatccccgatgagatcgaagaagcggcgatgatggatggcctcaaccgtctgcaaattatcttccgcatcaccgtgccgttggcgatgtccgggctgatatccgtgttcgtctactgctttatggtggcgtggaacgactatctgtttgcgtcgattttcctctccagcgccagcaatttcaccttaccggtgggcctgaacgcgctgttcagtacgccagattacatctggggacggatgatggcggcctcactggtgaccgcattgccggtggtgattatgtatgcgctttcggaacgttttattaagagtggtttgaccgccggtggcgtgaagggctaaagcggccagtttctttacaaggagttttaaatgaaaaagttagtagccacagcaccgcgtgttgctgcgctggttgagtatgaagatcgggcgattttagctaatgaagtgaagatccgcgtgcgtttcggcgcaccgaaacacggaacggaagtggtcgacttccgcgccgccagcccgtttattgatgaagactttaacggcgaatggcagatgttcactccgcgtccggcagatgcgccgcgcggcattgagtttggcaaattccagcttggcaacatggtggttggcgacattatcgagtgcggcagcgacgttaccgactacgcggtgggcgacagcgtatgcggctacggcccgctctccgagacggtcatcattaacgcagtgaataactacaagctgcgcaaaatgccgcaaggcagctcctggaaaaacgccgtctgctacgacccggcgcagtttgccatgagcggcgtgcgcgatgccaacgtgcgcgtaggggattttgtggtggtggtagggcttggcgcaatcggtcaaattgccatccaactggctaaacgcgctggcgcttctgtggtgattggcgtcgatcctatcgcccatcgctgtgatattgcccgtcgccacggcgcggatttctgccttaaccccatcggcactgatgtaggtaaagagatcaaaacgctgaccggcaagcagggtgccgatgtgattatcgaaaccagcggctacgccgacgcgctgcaatcggcgctccgcggtctggcttatggcggcaccatctcctatgtcgcgtttgccaagccgtttgccgaaggttttaacctcggacgcgaagcgcatttcaataacgccaaaattgtcttctctcgcgcgtgcagcgaaccgaacccggattatccgcgctggagccgcaagcgtattgaagaaacctgttgggaactgctgatgaacggttatctcaattgcgaagatttaatcgacccggtggtgacctttgccaatagcccggaaagctatatgcagtatgtcgaccagcatccggaacagagcatcaaaatgggcgttacgttttaattcaaaggaatgaaaaaaatgaaaatcggcacacagaatcaggcgttctttccggaaaacattctggagaaatttcgttatatcaaagagatgggcttcgatggttttgagattgacggcaaactgctggttaacaacatcgaagaagtcaaagcggcgatcaaagaaaccggtttaccggtgaccaccgcctgcggtggctatgacggatggattggcgactttatcgaagagcgtcgtcttaatggcttaaagcagatcgagcgcattctcgaagcgctggcagaagtgggcggtaaaggcatcgtcgttccggctgcgtggggcatgtttaccttccgcttaccgccgatgacctcgccgcgtagcctggacggcgaccgcaaaatggtgagtgattccctgcgcgtactggaacaggtcgccgcgcgtaccggaaccgtggtgtatctcgaaccgttaaaccgctatcaggatcatatgatcaacaccctcgccgatgcccgccgttacatcgtcgaaaacgatcttaaacatgtacagattatcggcgatttctatcacatgaatatcgaagaagataacctggcgcaggcgctgcatgacaaccgcgacctgctcggtcatgtgcatattgcggataaccatcgctaccagccgggcagcggcaccctggatttccacgcgctgtttgaacagctgcgcgcggataactatcagggctatgtagtgtacgaagggcgtatccgggcggaagatcctgcccaggcgtaccgtgattcgttggcctggttgcgtacctgctaagaggtctttgtgaaaagtgcaatgacaagctctccgctgcgggtcgcgataataggcgcaggccaggtggcggataaggttcatgcttcgtactactgcacccgcaacgatctggaactggtggctgtctgtgacagccgcctttcccaggcgcaggcgctggcagaaaaatacgggaatgcatccgtgtgggacgatccgcaggccatgctgctggcggtgaaacctgatgtggttagcgtctgctcacctaaccgttttcattacgaacataccctgatggcactggaagcgggctgccatgtgatgtgcgaaaaaccgcccgccatgacgccagaacaggcgcgggaaatgtgcgataccgcgcgcaaactgggcaaggtgctggcctacgactttcaccatcgttttgcgctcgatacgcaacagctgcgtgaacaggtgaccaacggcgttttgggagagatttacgttaccaccgcccgcgccctgcgtcgctgcggcgttcccggctggggtgtctttaccaataaagaactgcagggtggtggcccgctgatcgacatcggcattcatatgctggatgctgcgatgtatgtgctgggctttccggcggtgaaaagcgtgaatgcgcatagctttcaaaagatcggcacgcaaaagagctgtggtcaatttggtgagtgggatccggcaacttacagcgtcgaagattcgctgtttggcaccattgaatttcataacggcggcattctgtggctggaaacgtcatttgcactcaacatccgcgaacagtcgattatgaacgtcagcttttgtggtgataaagctggtgcgacgctgtttccagcacatatctacaccgataacaacggtgaattaatgacgctgatgcaacgggaaatagcagacgacaaccgccatttgcgcagcatggaagcctttatcaatcacgtacagggcaagcccgtgatgatagccgacgccgagcaggggtacatcatccagcaactggtggcggcgttgtatcaatccgcagaaacagggacgcgtgtggaattatgaccaggccagtaacgttatcagaaccccatttcagccagcataccctgaacaagtatgcatcgctgatggcgcaggggaacggctatcttgggcttcgcgccagccatgaagaagattacacgcgccagacgcgagggatgtatctggcggggctgtatcatcgggcgggaaaaggtgaaatcaacgaactggtgaacctgcctgatgtcgtggggatggagattgccataaatggtgaggttttctcgttatcccacgaagcctggcagcgtgagcttgactttgccagtggcgaattacgccgcaatgttgtctggcgtaccagcaacggctcaggttacaccatcgccagccgtcgctttgtttcggcagaccaactgccgctcattgcgctggaaatcactattacgccactggacgccgacgcgtcagtgctgatttcaacaggcattgacgccacgcaaaccaatcacggtcgccaacatctcgacgaaacccaggtgcgggtgtttggtcagcatctgatgcaggggagctacaccacccaggatggacgcagtgatgtggccatcagctgttgctgtaaggtgagcggtgatgtgcagcaatgctataccgccaaagagcgccgtttactgcaacataccagtgcgcagcttcatgcaggcgagacaatgacgttgcaaaaactggtgtggatcgactggcgggatgacaggcaagctgctttagacgagtggggcagcgcgtcgcttcgccagcttgaaatgtgcgcgcagcagagttacgaccaacttcttgcagcatcaacagaaaactggcgtcaatggtggcagaaacgtcgtatcacggtaaatggcggcgaagcgcacgatcagcaagcgttagattatgcgctttatcatctgcgcatcatgacgcctgcccacgacgagcgcagcagcattgcggcaaaaggcttaaccggcgaaggctacaaaggccacgttttctgggatacagaagtatttttgttaccgtttcatctgtttagcgatccgacggttgcccgaagtttactgcgttatcgctggcacaacttgccaggcgcgcaggagaaagcgcgacgcaacggctggcagggcgcgctatttccgtgggaaagcgcgcgcagcggcgaagaagagacgccggaatttgccgccattaacattcgcaccgggctgcggcaaaaagtggcctcggcgcaggcggaacatcatctggtggccgatatcgcctgggcggttattcaatactggcagaccacgggggatgaaagtttcattgcgcatgaaggcatggcgctacttctggagacggcaaagttctggattagccgcgcggtgagagttaacgatcgtctggaaattcatgatgttattgggccagacgaatataccgaacatgtcaataataatgcatacaccagctatatggcccgctacaacgttcaacaggcgctgaatattgcccgccagttcggctgtagcgacgatgcgtttatccatcgcgccgaaatgttcctcaaagagctatggatgccagaaattcagcccgacggcgttttgccgcaggatgattcgtttatggctaagccggcgattaatctggcgaaatacaaagcggcggcggggaagcaaaccatactgctggattattcacgcgcagaagtgaacgagatgcagatcctcaaacaagctgatgtggtgatgctcaattacatgctgccggagcagttctcagcggcatcgtgtcttgccaatctgcaattttatgaaccgcgcactattcacgactcgtcattaagtaaagcaatccacggcattgttgccgcacgctgtggcctgctgacccaaagttatcagttctggcgcgaggggactgaaatcgatcttggtgctgatccgcatagttgtgatgatggtatccatgctgccgcaactggcgctatctggctgggggcgattcagggttttgccggggtgagcgtgcgtgacggtgaattgcatctcaatccggcgttacctgagcagtggcaacagttgtctttccctctgttctggcagggctgcgaattacaggtcactcttgacgcgcagcgtattgcgattcgaacttctgcgcccgtttcactgcgtttgaacggtcagcttataaccgtggctgaagaatctgttttctgtttgggtgattttattttgcccttcaatgggaccgctaccaaacatcaggaggatgaatgaaactgcaaggggtaattttcgatctggatggtgtaatcaccgataccgcgcatctgcatttccaggcgtggcagcagattgccgctgaaattggcatcagcattgatgcgcagtttaacgaatccctaaaagggatcagccgcgatgagtctctgcggcgcattctgcaacacgggggcaaagagggcgactttaactcgcaggagagggcgcaactggcgtatcgcaaaaatctgctctatgtccactcactacgcgagttgacggtcaacgctgttctacccggcattcgctctttgctggcagatctccgtgcacagcagatctcggttgggctggcttctgtctccctgaatgcgccgacgattttagcggcgctggagctgcgcgagtttttcaccttctgcgcggatgcttcccaacttaaaaactcgaaaccggacccggaaatctttctcgccgcctgtgcagggctgggcgtgccgccgcaggcatgtatcggcattgaagatgcgcaggcgggcattgacgccattaacgccagcggtatgcgctcggtggggatcggcgcgggcttaaccggggcgcaattactgttgccttcaacggaatcactcacctggccgcggttatcggccttctggcaaaacgtatagcaaaggaatcaacatggctcagctttcgttacaacatattcaaaaaatctacgataaccaggtgcatgtggtgaaggacttcaacctggaaattgccgataaagagttcatcgtgtttgtcggcccgtcgggctgcggtaagtcgaccaccctgcgcatgattgccgggcttgaggagatcagcggcggcgatctgttgatcgacggcaaacgaatgaatgacgttccagccaaagcacgcaatatagcgatggtgttccagaactacgcgttgtatccgcatatgacggtttacgacaacatggcgtttggtctgaagatgcaaaaaatcgccaaagaggtgattgatgagcgggtgaactgggcggcgcaaattctcggcctgcgtgagtacctgaaacgtaagccgggggcgctttccggcgggcaacgtcagcgagtggcgcttgggcgggcgattgtacgcgaagcgggcgtgtttttaatggatgaaccgctctctaaccttgatgccaagctgcgcgtgcaaatgcgcgcagagatcagcaagctgcatcagaaactgaacaccaccatgatctacgtgacccacgatcagaccgaagcgatgaccatggcgacgcggattgtgattatgaaagacgggattgttcagcaagtaggtgcgccgaaaaccgtttataaccaacccgcgaatatgtttgtttccggatttattggatcaccagcgatgaattttattcgcggcacgatcgatggcgataaattcgttacggaaacgcttaaattaaccattcccgaagagaaattagcggttctgaaaacacaggaaagtttgcataagcccatcgtgatgggaatacgaccggaagatattcatccggacgcgcaagaggaaaataacatttccgccaaaattagcgtggcagaattaaccggtgcggaatttatgctctacaccacggttgggggcacgagttagtggtccgtgctggtgcgttaaatgattatcatgcaggagaaaatatcactattcattttgatatgacgaaatgtcatttctttgatgcagaaacggaaatagcaattcgctaaatacagggggaaggcattcccccaggataatacaaggaacaataatgaaaaagttattaccctgtaccgcactggtgatgtgtgcgggaatggcctgcgcacaggccgaggaaaggaacgactggcactttaatatcggcgcgatgtacgaaatagaaaacgtcgagggttatggcgaagatatggatgggctggcggagccttcagtctattttaatgccgccaacgggccgtggagaattgctctggcctattatcaggaagggccggtagattatagcgcgggtaaacgtggaacgtggtttgatcgcccggagctggaggtgcattatcagttcctcgaaaacgatgatttcagtttcggcctgaccggcggtttccgtaattatggttatcactacgttgatgaaccgggtaaagacacggcgaatatgcagcgctggaaaatcgcgccagactgggatgtgaaactgactgacgatttacgtttcaacggttggttgtcgatgtataaatttgccaacgatctgaacactaccggttacgctgatacccgtgtcgaaacggaaacaggtctgcaatataccttcaacgaaacggttgccttgcgagtgaactattatctcgagcgcggcttcaatatggacgacagccgcaataacggtgagttttccacgcaagaaattcgcgcctatttgccgctgacgctcggcaaccactcggtgacgccgtatacgcgcattgggctggatcgctggagtaactgggactggcaggatgatattgaacgtgaaggccatgattttaaccgtgtaggtttattttacggttatgatttccagaacggactttccgtttcgctggaatacgcgtttgagtggcaggatcacgacgaaggcgacagtgataaattccattatgcaggtgtcggcgtaaattactcgttctgataatgggctaaattgccggatgcggcgcgagtactttatccgatctataaatgtaggccggataagatgcgctagcatcgcatctggcattcaggcaaggtagctggtatttatttcagcgtcatatgcgtggcaacggtaatattctgtggtgacggttttccagaaattaagcggaataataactcgcagctttgttgacctaactcctgcgtcggaacatcgatgccgcccggtgcaggcgttaaaataaatgacagcgtttcattgctataacccaccaccgctaactgctgcggaatagcaatatttttctctgctgccgcacgataaatgctcattaatttcaggctgtcagtggcaaacaccgcctcaggcaacggtgactggcttaataattgccgtgctgcttttaatgcagtttcatgggtataaccgccatcaacaatccattcatcacgcactgcaatattatgcgcagccaggctctgcttataaccattaacgcgatcaaccgaaacatggacatcaagcggagcatgcaggcaggcaatattttgatgcccactttcaattaatgcatcggtcaacgcaatgctgtcgccaaaattatcggtatcgacagaataaacatgggcatattgaccttcaactttgccaatcaccaccaccggaatatcatatttatcgagttgggcaaaaaatgactcatccgctggcgaactgagcataataatgcctttaatcattttctgcttaattttgctttcgcatttttgcagatcttctgccggattgtgcgacgtttgtaatatcacgtcgaaaccttcttcttcagctttggcggtgatggcatgcaaaacttcagagaaaaacggattacccgccgtagttttggtcgaacgggtagaaatcaccataatggcatcaaaacccgaagaggtcagcgcgcgggccagcttgtttggctgatactgtaattcttcaatggcccgtaacactttttcgcgcgcttccggggagatattagtttgcttattcagcacgcgtgatacggtggattttgatacgcctgcaaccctggcaatatcataaatagtaggggacataggtcaggaactccgtccgaacgtgaatgctgcacatcttatggagttcgccggtcgatgacaacacgggcagttgataatcaatggcctggcccccacattcatatccttacgaatgattttttttctggtcttcagagcagcacaggacagcaatgaagcgacttaaaaatgaactcaatgcgctggtgaatcggggtgtcgacagacatctgcgcctcgctgtaaccggacttagccgcagcggcaaaacagcgtttatcaccgcgatggttaatcagttgcttaatattcacgccggagcacgtttgccgctgttaagtgcggtgcgtgaagagcgcctgctgggcgtgaaacgcattccccagcgtgactttggcattccgcgcttcacctatgacgaagggctggcgcagttatatggcgatccacccgcctggccaacgccaacgcgcggcgtcagtgaaatccgcctggcgctacgttttaaatcgaatgattcgctgctacgccactttaaggatacctccacgctgtatctggaaattgtggattatcccggcgaatggttgctcgacctgccgatgctggcgcaggactatttaagctggtcgcgccagatgacgggcttactcaatggtcagcgcggagaatggtcggcgaaatggcgaatgatgagcgaagggctggacccgctagcgcctgccgacgaaaaccggctggcggacattgccgccgcgtggaccgattatctccaccactgtaaagagcaggggctgcactttattcagcctgggcgctttgtcttgccgggagatatggcaggtgcgcccgcgctgcaattcttcccgtggccggatgtcgatacctggggcgagtccaaactggcgcaggccgataagcataccaatgccggaatgctgcgcgagcgctttaattattactgcgagaaggtggtgaaggggttctataagaatcattttctgcgctttgaccgccagattgtgctggtggattgcctgcaacctctcaacagtgggccacaggcatttaatgatatgcgtctggcactgacgcagctgatgcaaagttttcactacgggcagcgtaccctgttccggcgtttgttttcgccggttatcgataagctattgtttgctgccactaaagcggaccatgtgaccatcgatcagcacgctaatatggtttcattactgcaacaactgattcaggatgcctggcaaaatgcggcgttcgaagggatcagcatggactgcctggggctggcgtcagttcaggcgaccaccagcggcattattgatgttaacggtgagaaaatcccggcgctgcgtggtaatcgacttagcgatggcgcaccgctcactgtttatcctggcgaagttcccgcacgtttgcctggtcaggcgttctgggataagcaaggcttccagtttgaggcatttcgtccgcaggtgatggatgtcgacaaaccactaccgcatattcgtcttgatgctgcgctggaatttttaataggagataaattgcgatgaccgaaccgttaaaaccacgtattgatttcgacggtcctctggaggtcgatcagaatcctaaattcagggcgcagcagacctttgacgaaaatcaggcgcaaaattttgccccggccacgctcgacgaagcgcaggaagaagaggggcaagtcgaagcggtaatggacgcagcgttacgtccgaaacgcagcctgtggcgcaaaatggtgatgggagggctggctctgtttggcgcaagcgttgtcgggcagggtgtacagtggacaatgaatgcctggcaaacccaggactgggtggcgctgggtggatgtgccgctggggcattgattatcggcgctggcgtaggttctgtggtaacagagtggcggcgcttatggcgcttgcgacagcgcgcccatgaacgcgacgaagcgcgtgatttattgcatagccacggcacgggcaaaggccgcgcattttgcgaaaaactggcgcagcaggcgggtattgatcagtcgcatccggcgctgcaacgctggtatgcctcaatccatgaaacgcaaaacgaccgtgaagtggtcagcctgtatgcgcatttggtccagccagttttagatgcccaggcgcggcgcgaaatcagccgttcggcggcggaatcaacgttgatgattgcggtcagcccgctggcgttggtcgatatggcgtttatcgcctggcgcaatctgcgtttaattaatcgcatcgccacgctgtatggcattgaactggggtattacagccgtttgcgtctgtttaagctggtattgctgaatatcgcttttgccggagccagcgaactggtgcgcgaagtggggatggactggatgtcgcaagatctcgctgctcgtttgtctacccgcgcagctcaggggattggtgcaggacttctgacggcacgactcgggattaaagctatggagctttgccgcccgctgccgtggattgacgatgacaaacctcgcctcggggatttccgtcgtcagcttatcggtcaggtgaaagaaacgctgcaaaaaggcaaaacgcccagcgaaaaataatgcaatatcgggtgctgaccggatatctttacgccgaagtgcccgtttttccgtctttgtgtcaatgattgttgacagaaaccttcctgctatccaaatagtgtcatatcatcatattaattgttcttttttcaggtgaaggttcccatgcgtctggaagtcttttgtgaagaccgactcggtctgacccgcgaattactcgatctactcgtgctaagaggcattgatttacgcggtattgagattgatcccattgggcgaatctacctcaattttgctgaactggagtttgagagtttcagcagtctgatggccgaaatacgccgtattgcgggtgttaccgatgtgcgtactgtcccgtggatgccttccgaacgtgagcatctggcgttgagcgcgttactggaggcgttgcctgaacctgtgctctctgtcgatatgaaaagcaaagtggatatggcgaacccggcgagctgtcagctttttgggcaaaaattggatcgcctgcgcaaccataccgccgcacaattgattaacggctttaattttttacgttggctggaaagcgaaccgcaagattcgcataacgagcatgtcgttattaatgggcagaatttcctgatggagattacgcctgtttatcttcaggatgaaaatgatcaacacgtcctgaccggtgcggtggtgatgttgcgatcaacgattcgtatgggccgccagttgcaaaatgtcgccgcccaggacgtcagcgccttcagtcaaattgtcgccgtcagcccgaaaatgaagcatgttgtcgaacaggcgcagaaactggcgatgctaagcgcgccgctgctgattacgggtgacacaggtacaggtaaagatctctttgcctacgcctgccatcaggcaagccccagagcgggcaaaccttacctggcgctgaactgtgcgtctataccggaagatgcggtcgagagtgaactgtttggtcatgctccggaagggaagaaaggattctttgagcaggcgaacggtggttcggtgctgttggatgaaataggggaaatgtcaccacggatgcaggcgaaattactgcgtttccttaatgatggcactttccgtcgggttggcgaagaccatgaggtgcatgtcgatgtgcgggtgatttgcgctacgcagaagaatctggtcgaactggtgcaaaaaggcatgttccgtgaagatctctattatcgtctgaacgtgttgacgctcaatctgccgccgctacgtgactgtccgcaggacatcatgccgttaactgagctgttcgtcgcccgctttgccgacgagcagggcgtgccgcgtccgaaactggccgctgacctgaatactgtacttacgcgttatgcgtggccgggaaatgtgcggcagttaaagaacgctatctatcgcgcactgacacaactggacggttatgagctgcgtccacaggatattttgttgccggattatgacgccgcaacggtagccgtgggcgaagatgcgatggaaggttcgctggacgaaatcaccagccgttttgaacgctcggtattaacccagctttatcgcaattatcccagcacgcgcaaactggcaaaacgtctcggcgtttcacataccgcgattgccaataagttgcgggaatatggtctgagtcagaagaagaacgaagagtaagcgcgaatatgcctgatggtgcaacaccatcaggcatattaaattatgctttcagtacagccagagctgcttcgtaatccggctcggtggtgatttcatccaccagctggctgaaaatcacattgtcattttcgtcaataaccacaacggcacgcgctgccagacctttcagtgggccatcagcaattgccacaccgtaagcttgcagaaattcagcgttacggaaagtggagagggtgataacgttgttcagaccttctgcgccgcagaaacgagactgggcgaacggcagatcggcagagatacacagcacaacggtgttgtcgatctcagttgccagttggttaaacttacgtactgatgcggcgcaaacaccggtatcaatactcgggaaaatgttcagcactttgcgtttacccgcaaactgaccgagggtgacgtcagacagatcttttgccacgagagtaaaagtctgcgctttgctacccgcctgcgggatggaattggcgactgtaaccgggttgccctggaaatgaacggtttgtgacatgattatctttcctgtttacatatagttaacgtcacacctagtttatgctaactgtcaataacacagcaaacgctatttgcgcttaatccgcagaccaccgcgacaacaaggagtaaagatgagaaccgttaaggtattcgaggaagcctggcccttacataccccgtttgtgattgcccggggaagtcgcagtgaagcgcgcgtggtggtggttgaactggaagaagagggtattaaaggcaccggcgaatgcacgccgtatccgcgttatggggaaagtgatgcctcggtaatggcgcaaattatgagcgtcgtgccgcaactagagaaagggctgacacgggaggagttgcaaaaaattctccctgccggcgcagcacgtaatgcgctggattgtgcattgtgggatctggccgcgcgaagacagcagcaatcgctggctgatttgatcggcataacgcttcccgagacagttatcactgcacagacggttgtcatcggtacgcctgatcagatggccaatagtgcatcaacactctggcaggcaggcgcgaaattactgaaagtgaagctggataaccatcttatcagtgagcggatggtggcaattcgcacagctgtgcccgatgcgacgctgatcgttgatgcaaatgaatcctggcgtgcagaagggttggcggcgcgttgccagctattggcggatttaggcgttgcgatgcttgaacaaccgcttcctgcgcaggacgatgcggcgctggagaattttattcatccgttgccgatttgtgctgatgaaagttgtcatactcgtagcaatttgaaggcgctgaaagggcgctatgagatggttaatattaagctcgataaaaccgggggtctgacggaagcgctggcgctggcgactgaagcgcgtgcacaaggtttcagtctgatgctgggctgcatgttgtgtacctctcgtgccattagcgccgctttaccgctggtgccgcaggtcagtttcgccgatcttgacggaccgacctggctggcggtagatgtggaaccggcgcttcagttcacgacgggcgaattgcatctttaggatgccagcgcagcaagtttgccatcgcaaagagatatttttcgctggcttcgtcggaggagatgggcggaaactctgcggtgatgcaatgcaagttcagatctgcacaccaactgccgaaagagccaggcgtttcataaccgacgctggttaccagaggcaattcaaacgcctgagccagccattcgcctaattcgctgtgtctgggatcttcaatacaggccagtggatcgtggaatgagaccacccaggcaggttgaatgcggtgtataagctggcacagcgcctgggtttcaggttcggagccaggtttgtcacctgtcagtaatacgacatcgcgttcttcagcggcgctgttccagcgataaacggtttcaccttccttccagttcgccgccggaaagtttctgtttaaatccacaccattagcattggcccgtaaccccaactggcagccgtcaggattcacacacagcaccacatgatgacggcgcaaagaaggtgtcaacgtccgcagagcacaggagagcgtgacgaccgaagagttttcatcaccgtgagtgccagccagaatcaaaccactttcgcggctggctgcaggggcaggaaaccagattaacggcgcgcccaataatgaacgtccgtaatgttctgttccgggcggaaatgcgccgcgttcggcgcgtgggcgggttacggtcatgatcgtctctggttcaggaagtattacaggcagtgttgtgcaaattttgcggattatcaaatccttttcttcaacgctatgtcatcgatcttgtatcacttttttgccggaagttgtttgcattttattagttggatagggtttgtggatttttgctggctgacgggcaaataaagtttgtttaatggtttgcttatctgccagttgattaatcacatggcgggctatctgaccgccagcaccaagaatcagtacatttttcatgaaaattatcccagattattggcagcaatatgccagtccatatcactattgcggatttgaatatgtttcattacagagtttcctcaaagaacggagctaatactgaaattgcttcagccacataggctttgccgtcataaagatccatatggtttgcgccttcaacaatgtgatagcgtttatcctggcttgatgctcgatcgtacaggtcgtcactcatccatttgctccctgcctggctgcccgccacaatctgcgtcggctgagtcaggtacacttccgccatatggtaagcatcataggtaataatctggttaaggctgcgcaaagtagcgtaacccggtgctgttggatactgcgcgcgaggggtgtggtaatactcccaggcctgacgcagttcttcgttcggcgcatcggactccttcattggtgccagtggcataatggcgtattctccgctgctaatatcgctggttctggcgtttgaacccgcttcaacgtatggcagggcatcaatagatttcacattgttttcccaaccattacggaatatcgaaccaatattgaccgcactaacggtaccgatggccttgatgcggcgatcctgaattgcagcattggctgtatatcctgcaccggcacaaattcccatcgcaccaattcgggtattgtcgacataagaaagcgttgtcaggtaatcaatcacggcactgatgtcttcagtacgaatgtatgggttttctaactgacgcggctcgccgccactttcaccttgataagatgcgtcataagcaatagtgacaaatcccttttccgccagttttttggcataggttccggccgtttgttctttaacgcccccacctgggtgagataacacaattgcctgatactgacgggtttcatcaaattttggagggaaatagatcactgcagacaaagagatggttggattattgctgttagtgaagctgactttattattcatcattccgttcctcatggagttgtcggttcgttttaacggttggtgatatcactatagatattgatcattaagttgattagacccaaaatcatgattagacctatcatttaaatgattaatagattgcatggagatactgaatgaagcgtgaagaaatcgctgatctgatggcgtttgtcgtcgttgcagaggagcgtagcttcactcgtgcagcagcccgcctgagcatggcgcagtcagctttaagccagatagtgcgtcgtatagaagaacgattgggattgcggcttctgacgcgaaccacgcgcagcgttgttccaactgaagcgggcgagcatcttttgtctgttcttggccctatgttgcatgacatagattcagccatggcatccctgagcgatctgcagaaccgcccatccgggacaatacgtattactactgtagaacatgcagcaaaaacgatattgttaccagcaatgcgcacattcctgaaatcgcatcctgaaattgatattcagctcaccattgattatggtttgaccgatgtcgtttctgaacgttttgatgcaggcgtccgtctgggtggggagatggataaagatatgatcgccattcgaatcgggccagatataccaatggctattgttggctcaccggattatttttctcgccgaagtgttccaacgtcagtgtcacaattaatagatcatcaggcaattaatttgtatcttcccacatcgggtacagcaaatcgctggagattaatacgcggtggacgtgaagttcgtgttcgcatggaaggtcagcttttactgaatacgatagacctgatcattgatgctgcaattgatgggcatggattggcgtatctaccttatgatcaggttgagcgggctattaaagaaaaaaaactgatacgtgttttggataaattcacaccagatttacccggttatcacctgtactatccacaccgtcgacatgctggctcggcattctcattatttatagataggctgaagtataaaggtgctgtttagcactacttgctgatacattaatttaattcttctcttaacgtattctcagttcctttcaacgttttggtcattttttattcttcgtacaatggcgacagatgctgattatgataccgaaaacgggtttgaacgtgcgaagcccgaacgtagtgttcggagttctatgtgctttaccgcattttggagactattatttacactaaatctgatttgatatattgatacttaaaacatttgatgcttcctttgtcacttttttgatggaagttgtttgcatttctttaaggcgaaacaaataattacgcatcaattttaatgtcggttagagggaaacttatgaagcactctgtttcagtcacgtgttgtgcgctgttggtcagcagcatttctctttcgtatgctgcagaagttccgagcggcacagtactggcagagaagcaggagctggtgcgccacattaaagatgagcctgcgtcgctggatcccgctaaagccgtgggcctgccagagattcaggtcattcgcgatctgtttgaaggtctggtgaatcagaacgaaaaaggggagattgtccccggcgttgcgactcagtggaaaagtaatgacaaccgtatctggacttttaccctgcgcgataacgcaaaatgggcggatggcacaccggtaacggcgcaagattttgtctacagctggcaacgtctggtggacccaaaaacattgtcgccatttgcatggtttgccgcgctggcgggaatcaacaacgcacaggcgattattgatggtaaagctacgcctgaccagcttggcgtcaccgcagttgatgcccatactttgaaaattcagcttgataaaccgttgccgtggtttgtgaatttaaccgctaactttgccttcttcccggtgcaaaaagccaacgtagaaagcggtaaagagtggacgaaacccggaaatctgatcggcaatggcgcttatgttcttaaagagcgcgtagtcaatgaaaaactggtcgtggtaccgaatacccattattgggataacgccaaaacggtactgcaaaaagtgaccttcctgccaattaatcaggaatccgcagccactaagcgttacctcgcgggggatattgatatcaccgaatccttcccgaaaaatatgtatcagaagctgttgaaggatattccggggcaggtttatacgccgccgcagctcgggacctattattatgcgtttaacacgcaaaaagggccgacggcagatcagcgcgttcgtctggcattaagtatgacgatagatcgccgcctgatgaccgaaaaagtattagggacgggcgaaaagccagcgtggcattttacaccagatgttaccgcgggatttacgccggaaccttcgccgtttgaacaaatgagtcaggaagaactgaatgcgcaggcaaaaactttgttgagcgcagctggttatggtccgcaaaaaccgctgaagctgacgcttttgtataacacttcagaaaaccatcaaaaaattgcgattgctgtagcatcgatgtggaaaaagaaccttggcgtagatgttaaattgcaaaatcaggaatggaaaacctatatcgatagccgtaacaccggcaattttgatgttatccgcgcctcgtgggtgggggattataatgaaccctccactttcctgacattattaacgtcaacgcattcaggaaatatttcacgctttaacaatccggcatatgacaaagttctggcccaggcatcgacggaaaataccgttaaagcgcgtaatgccgattacaacgcggcagaaaaaatcctcatggagcaagcaccgattgcaccaatttatcaatataccaatggacgattaatcaagccgtggctgaaaggttatcccattaataatcctgaagatgtggcgtacagtcggactatgtatattgtgaagcattgatgtgatgggaactggcgttacccttgtgcataacgccagtgatgtctgatttagcgaccctgttccggcggtgtaatgttatccatatacagcgtctggctggggaaggcaaagtccgcgccgtgtgactgtacaatatcgataatcttcaaataaacgtcttgctgtgcagcaagccattcagcccataccgtggttttggtaaagcaataaaccataatattcaatgaagagtcagcaaactggttgaaataaaccagtaaggtttgtcgctggtcgatggccgggtgatttttcagcatctcacgtacagcttcgacaataacgcccacttttgccgcatcctcataacgtaaaccaatggtcgtggtaatgcggcggttggtcattcgtcctgggttttctacgctgatcgacgaaaacagcgagttcggtacgtacaatggacgattatcaaaggtcgtaattttggtaattcgccagccaatttccgctactgtaccttcgatatttctgtccggtgaacggatccagtcgccaatactgaaaggacggtcgaaatagagcataatcccggaaaagaagttactcagaatatctttaccggccataccgacagccagaccaccaataccaccaaaggtcagcaagccagaaaggctcatgccgaaatgttcgccataaagcagaacaagcaccacaataatggtgattttgatgatacgcgacataatccgcgcactggtgatatcgcgaccttttttaatctgctgtttttcaaactgattaatcagcagaaatagcttaatcgtcagaataaccgcaatcagggacgtacagataaaatcgataacgcctggggtgataaatttgagtttatagttttctataacataattaataatgctaccaacagcactgataattatggtgtagattaaaaattgcaccgcatggaataaaaatccttttcttttacgatttccacggcgaaaccaaaagctcatcagaatcaatgctgcgcagctaccgaaaataatgaccagattaagcgcattatttgtaaacagttcagcgatcattgttttatcaggctcctccagataattgtcgtcatgccggaaacccctggcggggctattttaccgcgacaattcattcagatcatcaatagtcagggaaggaagtagcaacattagctaaggaaggtgcgaacaagtccctgatatgagatcatgtttgtcatctggagccatagaacagggttcatcatgagtcatcaacttaccttcgccgacagtgaattcagcagtaagcgccgtcagaccagaaaagagattttcttgtcccgcatggagcagattctgccatggcaaaacatggtggaagtcatcgagccgttttaccccaaggctggtaatggccggcgaccttatccgctggaaaccatgctacgcattcactgcatgcagcattggtacaacctgagcgatggcgcgatggaagatgctctgtacgaaatcgcctccatgcgtctgtttgcccggttatccctggatagcgccttgccggaccgcaccaccatcatgaatttccgccacctgctggagcagcatcaactggcccgccaattgttcaagaccatcaatcgctggctggccgaagcaggcgtcatgatgactcaaggcaccttggtcgatgccaccatcattgaggcacccagctcgaccaagaacaaagagcagcaacgcgatccggagatgcatcagaccaagaaaggcaatcagtggcactttggcatgaaggcccacattggtgtcgatgccaagagtggcctgacccacagcctggtcaccaccgcggccaacgagcatgacctcaatcagctgggtaatctgctgcatggagaggagcaatttgtctcagccgatgccggctaccaaggggcgccacagcgcgaggagctggccgaggtggatgtggactggctgatcgccgagcgccccggcaaggtaagaaccttgaaacagcatccacgcaagaacaaaacggccatcaacatcgaatacatgaaagccagcatccgggccagggtggagcacccatttcgcatcatcaagcgacagttcggcttcgtgaaagccagatacaaggggttgctgaaaaacgataaccaactggcgatgttattcacgctggccaacctgtttcgggcggaccaaatgatacgtcagtgggagagatctcactaaaaactggggataacgccttaaatggcgaagaaacggtctaaataggctgattcaaggcatttacgggagaaaaaatcggctcaaacatgaagaaatgaaatgactgagtcagccgagaagaatttccccgcttattcgcaccttccctaactaatcaatgcgttgattgtaaatccagctaagaggtgaggttttcagagcagacaacggtgaaatgtcatggtattgttacgtttaggtaacaagaaatttgtctgcacaaggattacatcatgattatggcgaaactgaagtcagcgaaagggaagaaatttctctttggtttgttggcggttttcattattgcggcgtcggttgtgactcgcgcgaccatcggcggcgttatagaacagtacaatattccgctgtctgagtggacgacatcaatgtatgtgattcagtcatcgatgatttttgtttatagcctggtctttactgtgttgctggcaatcccgttgggaatttatttccttggcggcgaagagcagtaagtaaaaaataggcccgataactcgggccttgtcagttattgaagagtcgttaatcgtcttcttcgtcatccagttcaacgggtgtctgatactggtcaggtttaatgaccagcaggtcgcagcgaagatgatcaatcacctgttccgccgtgttgccgaggaatgctgctgaaataccggtgcgtcctaccgtgcccagaaccacaatccccgcctgtaagtgctccgccaaatcaggaatcacctcttctggcagacctttttctacgtgcgtcatgttttcattaatgccgaatttctgccgcagggctttcattgccagcaaatgttgcccacgaatggcatcgttataaacgctcgggtcaaattccggcagttcaatcgcgatattaattggcgttaccggataagcgccaaccagatgaacttcggtatggttgacttgttctgccagttcgatcgtctctttgaccagtttttcattgagcgcattatgatacggctcttcactggcgagattcaccgccaccagcgccttgcctccttccggccacggctggtctttcaccatccacaccgggcttgggcatttgcgtaacagatgccagtccgttggcgtaaaaatcaccgcttccagacggtcatgttggtgcgccatttttagcaccaaatcgtgtccgccgctgatcacttcctgaatgatggcttcgaaaggacggttatgccagaccactttaatttcaatgggaacgccagcattgagataatattttgcctgctcgtggatccaggctgtacgctggctgatgacgccctgacgcatagcggtacgttcgtccggggagagcagggtggtcatttcgtatgagaagtcatagatcggcaaaaaggctttaattttgccaccaatccgttgatgtaaataaacagctcgccgcaatgctggttggtcgtcctggttaggatcgataacaacgagcatgttctgatacatagccatacagggtctccttacaacaactgtcaacgcagtttgtaattaaaagattaacccatatctggtgaatgaaacagtgatgaaccttctgccagatcaataaatcagaaaaatttaatgatatgacagaaggatagtgagttatgcggaaaaatcaggcaacgttacgcgtatgaccagcaagctgggccagcgcatcgttattttcgatggtgatgtatttacctttgactgccagcatgccgcttttctggaagcgacccagcagacggctgatggtttctaccgtcaggcccagatagttaccgatatcgccacgagtcatcgtcaggcggaattcacgaggggagaagccgcgttgggcaaaacgacgggacaggttgtagatgaatgcagccagacgttcctcggcatttttcttcgacaacagcaggatcatgtcctgatcgcctttgatttcaccgctcatcagacgcatcatctgctgacgcagattcggcattttaccggacaaatcgtccagcgtttcgaacgggatttcacataccatcgaggtttccagcgcctgcgcgaagctcgggtgatggccgctgccgatggcgtcaaatcccaccaggtcgcctgctaaatggaaaccagtgatttgctcgtcgccttgctcagtgatggtataacttttaatcgtaccggagcggatggcataaagcgatttaagttcatcaccagccttaaacagcgtctggcctttctgaataggcttcttccgctcaatgatattatcaagctgatcaagctcatgttcgttgagtgtgaacgggatgcaaagctggctgatgctgcaatcctggcaatggatagcacaaccgccagactgaatgcgccgtataattcgcttttccgggatcataggtctgctcaagccgtaattgatatttgtcaattttaacatctttttagggagcaagtaagtctaagcaaaccttaacagcagagaattccgatattagatgtaaatatatgtctatctatttgaaaacccttaagttgttaagggtaactttacataaaagtgtgaacaagctggcacaaattgtttaatgtttacagcaaaagataaccttcatggcgcaataaccactcttttcgctgaactccgcctgcatatccggtcatggtgccgtttcggccaataacccgatggcaaggtacgacgatgctgatgggattcgatccgtttgccgcaccaacggcacgcgccgcgccaggacggcccaattgctcagccagttggccgtaatgcattacctgcccgcaggggatagtgcgtagtgttttccagacttcgcgctgaaatggcgtcccccccgtagcagtgggaagcgtatcaataatgctaagattaccggcaaaatattcacgaagcttgtcgcttaaaccgcctggattggtggcagaaatgcgctcatagccttctttgcgataatggatgtccagcagctgcaccatgcgttcgctgtactcttcccattcaaccgcccgcaggcgaaattgctcatcgcaaatcacccacagtggacccagtggcgtggcaattttttcttcaagtaatctcagcatccgttctctcttaagacaaacgtgggtaaatacccggacctatcggcagaccgacaagataccacgccagcaacatcagcagccataccaccaaaaagataagtggatagggcaagactaacgaatagtaagtacccagtttcgcgtctggtttgtagcgttgcaggaatccaagaaacagtggaacaaaaggagataccggcgctaaaggcaatacggatgagtcggcaatacgaaagaggatttgcgcaaatgccgggtgaaagccaagtagcataaacattggtacgaaaatgggggcgagaatcgaccagattgcggaaccgctggcaataaacatgcataagaaagaggaaagcaacgccagaccgacaaacgccgggatgccgctaagccctgaactttccagtatatcggtcagccccacggcgatgaatttccccatgttgctccagttaaacatggcgacaaattgggcgaggggaaaaaccatcacgataaatcccgccatctctttcatcggttcaatcattaaatgcggtaaatccgcctgacgtcgaattgtgcgggtagcgatgccataagccagcgagacaacaaagaaaaaaagaatgatcagtggcacgatacctttaataaagggtgatggcatcacggtgtgattaatcggatcgcgcaatatcccgttttgcgggatcaccatcagcgcaatcgcagcaataaaaagtagcgatacgacacctgctatgcgtaaaccaaaacgctgactttcggtcaatgtctgcagtttctcatcgctgtttccctgccattgacctaaccgtggctcgatgattttgtcggttatcaggccgccaacaatcgtcagtacgactacggagctggccataaaataccagttatcaattacactgacgtgcatttgcggattgaacgcagctgccgcttccgtgctgatccccgacagcaacacgtcggttgtgacaatcagtaaattagccgtaaagccgcaacctacgcctgcaatggcagccagtaaacctgcaactggatgcctgcccaccgccagaaaaatcagcgcacccatcggtggcatgatcactaacgccgcatcggaagaaatgtggctgaaaaaagcaataaacagcaccatataactggcgtagcgggcattaacatgcgatgccattttaaccattagtgctggcagtaagccgacgcgctccgccagaccggcacctaaaaccagcgccaggatcgcaccaagtggagcaaaaccgctaaagtttttaataacattgggtaaaaaccagtgtaatccttccacactgagcaggtttttcaccacgaccggcgtaccatcggtcgggtttttcgcactgacgccaaaggccgacaaaattgccgtcgtcaccatgagtacgataatcaaatagataaagagcagaaaaggatggggaaccttgttaccaattctttcgacccagccatagagcttcccggattgggaggacgacggtatggatgacatactcatgggcattcctcggttgttgtgtttgcgttgttgttgttattttaaaggtgacggtgtcacgtttttcgggatagggcagtgatacggttgcgtgtccgttacttgctgatgctcttgttggcattcttgcaatagccctgaatcaaggaagagattgactgtggttgctgccatagttttcgccgccagcagcattcctttatgagcaatagatgttcgcccctggctaaccagttgccacgtatgtagcggtgtaccgacggcaaaacaggggctgaaacactgggcaacaggcagtttccaactgacgtcgccgacatcagtcgatgccgcaagcacgttatcggtggcggcatatggagcgacttcattcgccagtaccgtttcacgatgacgtagtgcaaaaaccttgccgttttcgccaccggttgcggcgatattattcagactgttttgccgatcgttggaggtgagcgtagcctgaatttgtttcgcaaaagccagttcttcggagttccattccggggtaccaaaatgggatagggcctggtacatggcattttctaaggtgcgattcgggagataactggaacaggctttgtcgaagcggcattcaaccgtggtttcggtcatcaatgccgcaccttcggcgattttggcgacccgatcataaatatgctgcacgtcggtcatttcgggggcgcggataagataaagcacttctgcctgcgcctggaccacgttgggcgagatcccgccgctatttgtgatggcatagtgtacgcgcgctttttcaataatatgttcgttgaggaagttggtgccagtggtcatcaacgttacggcatcaagggcgctgcgtcccaaatgaggggaattcgcggcatgtgctgcgatccctttaaagcgccatgatgcctgaatgtttgccagcgtgcgggtattgaacataccggcaaaggcttccgggtgccaggtgagtgccgcatccacatcatcaaataccccctcgcgaaccatgaacgttttacccgagccgccttcttcgccaggacaaccataaaagcgcaccgtgccgccttgcccatattgttccagccatttcttgacggctattgcagcggcaaaggcggcggttcccagcaaattgtgtccgcaaccgtgaccattttcaccgggcgtcacggatgtaggttgcgcgcaacctgcttgctgacttaaacctgccagggcgtcatattctcccagcagggcgataaccggtttgccttgaccaaacgaagcaataaaggcatttgggatattgcctacgttgcgggtaacggtgaagcctgcagattccagcgccgaagccagatgctccgctgaccagaactcttcaaaacgtgtttctggatgatcccagatttgatcggcaatatcggtataacgttggcgatcggcttcaatcgcatcgtcgataaaacgatagatttcctgcatcagatacctcgcgtccagggaaaattgagcgcggtgcgcgccagcgtttcgacggcaatagcgagaacctgctcgtcaaaatcgaatttttcgttgtgatgacctgccgccagctgtgtgccaaacaccacgtaggaggcttgcccttgatgttgctgcacgcgggccatcattaatgtggcatcttcggaacccgcaggcgcttcaacacgttcaatggcctgattgacccccgcgacctgagccgcctgactttgcaaccatgcgacccattgcggcgaaggagaactggcggtagctgcacccatcagacgagtttcaacgccgacaccatacatggttgctgcgccctgaatcgcttgttgtgcacggtcaaaaacatattgattaatgacgtcgctggccccgcgtgtttccactttcagcaacgccgaggcaggaacaacgttacgaccgcttcctgcctgcataacgcccacgtttactctggaagctccttcgctgtgcggggcgattgcatgcagtgcaagagtggcttgtgctgccgccaacaaggcattgtgaccgtcttctggttttgcgcctgcgtgagcggcggtaccggtgaagtgcgcgtcaaatttggtggttgccataaaattatcactgccgcacaccacggtgcccgcaggtacgccagtgccaatgtgcacggcagtaaaataatcaacatcatctacgacacctgcatcgaccatcgcccgcgcgccacgcgtaccttcctctgcaggctgaaaaatcagtttgatgacgccatgtagtccggactcgaactgtttaagggtatgcgccagcccaagcccaatggcggtatgtccatcatgaccacaggcatgcatcattccggcgttacatgacgcaaaaccgtcgcggtaggggcgatggctgacatcctgctcttcactgagatccagcgcgtccatatcgacacggaaagccatcaccggaccggggcgaccggtatccagggtggcgacgataccagtgaaaccaccttcaaaagccgcaatccattgtgctagcgcaccctgttgacgagcgcgctcgaattcgcgttgtagagtgaattcatcaggtaatcccatccggctactttcattaactacttcgcgacccagcgccagtgaatagccgagctggtgcaattcttccgcaacaagggtggcagtgcggaattccacccagccagactctgcatagtgatgaaaatcacgtcgccagtgcgataattttggggcaagcgaattaacaaattgattcaaagactccataacctttcccgtcatcagtaaaaagtgtgacccggttcacgtagcgatagtttttacttatcactaactgatttttcacagttttaaccgttcataaattaccctgacacaatcatctgcattaaagtagatgccagtttctttggtctgataaataacggttatcggtggcgtcatggcttttcaggtaaaaattcatcaaattcgggcttttgttgaagtggctcgtcagggcagcattcgcggagcgagccgaatgttgaatatgtcgcaaccggcactgagtaaatctattcaggagctagaagaagggttagcggcgcaactcttttttcgccgtagtaaaggcgtgacgttaactgatgccggtgaaagtttttatcagcacgccagtctaattcttgaagagctgcgcgcagcccaagaggatattcgccaacgacaagggcaactggcagggcagattaatatcggcatgggggccagtatttcccgcagtctgatgccagctgtcatatctcgttttcatcagcagcatccgcaggtaaaagtacgcattatggaagggcaactggtgtcgatgattaatgaattgcgtcagggagaattggatttcaccatcaatacctattatcagggaccgtacgaccacgaatttacttttgagaaattactggaaaagcaattcgcgatcttttgccgcccgggacaccccgccattggtgcccgttcgatcaaacagttactggattacagctggacaatgccgacgccacacggcagctactacaaacagttgagtgaattgcttgacgatcaggcgcaaacgccacaggtcggtgtagtctgcgagacgttctcagcctgtatcagtctggtggcaaaaagcgattttctcagcaaactgcctgaagaaatgggctgcgatcccttgcacggacaggggctggtgatgttgccggttagcgaaattttaccgaaagcggcctattatttgattcagcggcgtgatagtcgccagacaccactgaccgcgtcattaatcacgcaattccggcgagaatgcggctatctgcaaagttaaaactgcataaaaaaatagagtctgtcgacatccgccagactctacagtacacacagcagtgcatccgcgtcttaaatccggcattgtctcctctgcgccggtgactgtgttataacggttttaacctttagttgccaattttcttcagtgacagatttcacgaaaatataagttacattattaatatcgtgaatgaataatcatgcataagtattttgcttaaaatatcggcaatatttggaacttattactggaaatttgggtaatacgttgttggaccgacccggtctggttatcatatcgcgctcttaattgcgggaggatgtaacatgaaccttgacgacaaatcgctgtttcttgacgccatggaagatgtccagccgctgaaacgtgctaccgatgtccactggcatccaacgcgtaaccaacgtgcgccgcagcgtatcgacacgctgcagcttgataatttcctcaccaccggatttctcgacatcatcccactaagtcagccgctggagtttcggcgggaagggttgcaacatggggtgctggataagctgcgcagtggtaaatatccgcaacaggcgagcctgaatcttttgcgccagccggtggaagagtgccgcaaaatggtgttcagttttattcaacaagccctggcggatggtttgcgtaacgtgctgattattcatggtaaagggcgggatgataaatcgcatgccaatattgtccgcagctatgtggcgcgctggctgaccgaatttgatgatgttcaggcatattgcaccgcgctaccgcatcatggcggcagcggggcgtgttacgtcgcactacgtaaaacggcgcaggcgaagcaagaaaactgggagcgccacgctaagcgcagtcgttgatctcgagacgcatccgcggcttatgccgccagcacgcggttgcgtccatcatttttcgcccgatacaaagcatcatcaacgcgtttaaacagttcatcgatgctttcatttccttcgtgatgcgccacaccaatgctgacggtaaagcgtggtaagcccgaaatactcacttttgccacgcttacgcggatagtttcagccagcgaaagcgcggtatccagtggggttcttggtagcaataagacaaactcttcgcctccccaacgaaacaccaaatcgcctttgcgagcgcaactttcgagggtgcgggcgagggcgcataacacctcatcacctttagaatgcccatagagatcgttaatgtgtttaaaacgatcggtgtcgatgagcaacaagctgtaatcctgagcgatggcgagatgctgcatttggcctggttccgtaatgtgataaaactgtcgccgattcagtaatccggtcatcgcgtcatggtgagcagcatgttccagctgctcctccagccgtttttgctcagtaatatcatgcacaatacataacatgagcttgtcgccataaatttcaatcggtccggcataggtctgcacatgacgagtcgaaccatccgccagtttatgaacaaaattcaaaggtttatgaccaccgggtaaatgcgagatttcatgcatgataggcatgacgcgacgcccgagcatatttatttcccaggtatgtttctggcacatcgtttcatggttataaccatagaaattgagcgcggcgaggttagcatcgacgatttgtccatctcgtgacgggtcaatcaacaacattggtgcagagttagtcagaaaaaagcgcgcataaaaaccttgttttttgcgctgataatttgccgagcgactggcttttaaacccagcgttgccggcgcttcgataccttcgaaaataatcaccggttctgtttctgtcagctttcgcaaaacaagccgacagctcaatgctgtttcctcttctttacgctgaacagtgaggatttcgataatatcgtgttggttttgcagatcggagaggtatttcggcagttctttttgtgaggagacggaatagggtccggttcgtagctgactaaacgtgaggtcttgcatcaacagtttcgccgcgctattggcataaattaactgttcctcaaagggcgaaacgatccagacaggactggtgagtaagtccagggtattgaagttgtgcgtaatcattgagatcccgttatttttatcaatttttgttgctatccgatcgcaaaaaagccacgtcatatgatcagataattctgataatgatagacgctatttaacacttcacacggtttgtatacggaaaagcattttgctttttgtattcaatttagacagaattttattaatcatttcagggtaatggggtgatgagatgttgcgtaacagggccagaaggctagactacaaaataatgcgttgatgatggaggcactgtggaagcgattaagggatcggacgttaatgtcccggatgcagtatttgcctggatgctggatggtagaggcggcgttaaaccgctggaaaatacagatgtgattgatgaagcgcatccctgttggctccaccttaattatgtacaccatgatagcgcccaatggctggcgacaacaccgctgcttcccaataacgtacgtgatgcgctggcgggcgagagcacgcgtccccgagtcagccgtctcggtgaaggcacgctgattacattgcgctgtataaacggcagcaccgatgaacgccccgatcaactggtcgccatgcgtgtatatatggacgggcggttaattgtttcgacccgacaacgcaaagtgctggcgctggacgatgtggtgagcgatctggaagagggcacgggtccgaccgattgcgggggatggctggtggatgtgtgcgatgcgttgaccgatcattccagtgaatttatcgagcagctgcacgataaaattatcgaccttgaagataatctccttgatcagcaaattccaccgcgtggattcctggctctgctgcgcaaacaattaattgtgatgcgtcgctatatggcaccgcaacgtgatgtttatgctcgtcttgccagtgaacgtttgccgtggatgagcgatgaccaacgccgtcggatgcaggatattgccgatcgccttgggcgcggccttgacgaaatcgacgcctgtatagcacggactggcgtgatggcggatgaaatcgctcaggtgatgcaggaaaatttagctcgtcgtacctatacaatgtcgttgatggcaatggtctttttacccagtacctttctgaccgggttatttggcgtcaaccttggtgggatccctggcggcgggtggcaattcggattttcaattttttgtattctgttagttgttcttattggtggtgttgctttatggttgcatcgtagtaaatggttgtaacaaaagcaatttttccggctgtctgtatacaaaaacgccgcaaagtttgagcgaagtcaataaactctctacccattcagggcaatatctctcttgcaggtgaatgcaacgtcaagcgatgggcgttgcgctccatattgtcttacttccttttttgaattactgcatagcacaattgattcgtacgacgccgactttgatgagtcggcttttttttgcctgttatttatcagcgtctaccctttaagagtccacccaatgaccagagggaaatatgacgacacttatttatttgcaaattcctgtccctgaaccgattcctggcgatcctgttccagtgcccgatccgatccctcgcccgcaacccatgcctgacccaccacccgatgaagaaccgattaaattgtcgcatcgtgagcgtagatctgcgaggatacgcgcctgctaactttgcgtcgatgaccacgagaatagattgtgaccgctttttctaccctgaatgttttgcctcccgcccaactcacgaaccttaatgagttgggttatttaaccatgacgccggtgcaggccgccgcgcttccggcgatccttgccggaaaagatgttcgcgtgcaggcgaaaaccggcagcggcaaaacggcggcttttggcctcggcttgttacagcaaattgatgcgtcgctatttcaaacccaggctttagtgctgtgtcctacgcgtgaactggcggatcaggtggcaggtgaattgcgtcggctggcgcgttttctgccaaataccaaaattttgacgttgtgcggtggtcaaccgttcggtatgcagcgtgattcgttgcaacatgcgccgcatattatcgtggcaacgccggggcgtttgctggatcacctgcaaaaaggcacggtatcactggatgcgttgaatacgctggtgatggatgaggccgaccgcatgctggatatgggatttagcgatgccattgatgatgtcatccgttttgcgcctgcatctcgacagacgcttctgttttcggcaacctggccggaagccatcgctgcaatcagcggacgagtgcaacgcgatcctttggcgattgaaattgactcaacagatgctttgccacccattgaacaacaattttatgagacatccagcaaaggcaaaattcctctgttgcaacggttattaagcttgcatcagccatcctcttgcgtggtgttttgcaataccaaaaaagattgccaggctgtctgcgacgcgctgaatgaagtagggcaaagtgcattgtcattacacggcgatttggagcaacgcgatcgcgatcagaccctggtacgttttgctaacggtagcgcccgtgtactggtcgcgactgatgttgctgcgcgtggtctggatattaaatcgcttgagctggtggtgaactttgagctggcgtgggaccctgaagttcatgtacatcgcatcggtcgtacagctcgtgcaggaaatagcggtctggcgatcagtttctgtgctccggaagaagcacagcgggccaatatcatttctgacatgttgcagataaaacttaactggcaaacgccgccagctaatagttccattgcgacgctggaagcagaaatggcaacgttgtgtatcgatggcgggaaaaaagccaaaatgcgcccgggtgatgtattaggtgcactgacaggagatatcgggcttgatggcgcagatattggcaaaatcgccgtgcatccggcgcatgtctatgtcgcggtccgtcaggctgttgctcataaagcatggaaacagttacagggcgggaagattaaaggaaaaacgtgccgggtgcggttattaaaataatgaaatgttgaattgccgggtgcaagagtaaacatcttattcgggattgccggatgcgacgctggccgcgtcttatccggcctccataagagtagcccgatacgcttgcgcatcgggcgctatcctggttatttcacttcaaccacattcagccgtaactcatccaactgattttcatcttcttctggctgccagcacgccggttgtagtgggatctcttcgcgatcaaacgccagatcacccccgttaaccacttcagaaccgtgggtgatgcctttgaaatcgaacaggttggtatcgcacagatgcgacggcaccacattctgcatcgcgctgaacatcgtctcgatacgccctggataacgtttatcccagtcacgcaacatgtcagcaatcacctgacgttgcaggttaggctgtgaaccgcacaggttgcacggaataatcgggaacgcttttgcatcggcaaatcgctgaatatctttctcgcggcagtaggccagcggacgaataacgatatgtttgccatcatcgctcatcagtttcggaggcatacctttcatcttaccgccgtagaacatatttaagaacaacgtttgcaggatatcgtcacgatggtgacccaacgcgatcttcgtcgcccccagttccgttgcggtacgataaaggataccgcgacgaaggcgagaacacagtgagcaagtggttttgccctctggaatcttctctttcacgataccgtaagtattctcttcaacaatcttgtactcaacgcccagcttttcaagatactcgggcagaacgtgttccgggaagcccggttgcttttgatcgaggttaacagccaccagcgaaaaattgattggcgcgctttgctgcaaattgcgcagaatctccagcatggtatagctgtctttacccccggagaggcaaaccatgatgcgatcgccttcttcaatcatattgaagtcagcaatggcttcgcccacgttacgacgcagacgtttttgtaatttgttcaggttgtattgttctttctttgtaatttgttgattttcttgcattatttcagttctctggtactaaatggggcaaattgggggcaaactttgcaactacgataaccgcgcattcaacatggctatctgttcgtcgttcatgtcatcaatccacataccgtaaatttcatacaccatctgcgcagtttcatgccccatttggctggctataaatgccgggttcgctcctgccgtcaacagccagcaggcaaaagtatgccgcgtatggtacggattacggcggcgaataccagcacgttttactgctgcattccaccttgcccccaaactgcttaccgagtaataaggtttttgttttccgttacacaccctgggcatgaaaacaaaatgcagtttttgcttttcggttctgccgtactcccgatgataaaaggtgatttcgcttttgcgatgatgcccggtcagtttgtattgctccttcagtgcttcaagagcaggctgcagtagtgttactgttcggatcccggcatttgtttttgggggaccgaacatatcaagtatcgtcaggtttcttctgacattcactattcccttttcgagatccacatcctcccacgccagagctgccagttccccgtgacgaagtcctgagtaaacggcaaatttccacaagttctggctctgtcctttttcactttccattaatgcattgaattctgttttagataacggatcaggctttattctgtttcgctgtaatttttttactccttcaaatggtttggttgatataaatcccgactgatacgcaaaacgcaacagcgaacagagcagggcgatatagttatcaactgtgcgcacggttcttccttttttgttggatcttggattatccaggtaaagcgtttctccatgcagcagttcattccggtagtttaagatatcgctataacgaatatgtgatatcggggtactttcacaaattattattctgagtgtttttaattgtgatttcgttttcttcattgtgtttgttgttaactctgtctctttaatttttgtccagatatcacaaagctctccgaacgtttttatgactctcgttgtcaccatttttgccccagtgctggactggggaaaacgtcttaaatactcaaattcaccggagtttatttcatgaactatcagcgctcttaaatttccggcctttttaatattactgtttgtaatctcccagccttttaatgtttcccgacatcgttttcctcgaaacatgaaccagatgcgaatgtatctacctctaatctcgacacctgttggtaatttagacatatcatgagtctttgataaactgatttatctttggatagttgtaccagataatccctcgtttgctgtctggcttacctaaaggagatactcgtttgaagtggaagccctccacccaacagttctggcggtatgcttcaatttgtctggcccccagaccagtgcgaagcatcaggccgtattcaaccatccactcttcattaaagattacttgtgccatcgcatcacctctggcaggcgccaatgttagactgaaattgacgcccgatgttgattattaataatcagctatgaagttttaatttgaatacaatgcaattctcgaggactgaagtttctcgcaattaaaatttatcagttttactttctgctctctggaaacgcctgcttcttttttacctgagagcattttttcgcattctgatttcgttagtttagattttgaatatcttgtccagttagtaggagtgccaccttccttttcaatagtggcggtaattttatacatgaacacctccattattatttccagtggttcgtttattccatctttcgagtgcttctttttcacttccaccataaccggttcgggattcgcatccgttacacttcgctcggtaatatcctgaaatggctttcaccgttactgatggacaaccacaaaatggacatggtttaacattgtcatatctcataatttttctcataaaaaatatttcaagttggcggtgcattacaccgccaggctgaattattcctctgaattatcgattacactgtattccccggttaatacagaggaatctgcaggatcgattgtcagtggttccttttcatccattgatactgcacgctggatctcaattgatacgggcaaatatttgaacaggcgacgaatagccgttttctttgccatttcttcccagtgagttacccacggcccgttattaccagctttactcaggctgcgcaccagctcaatctgtttgcgcgtcataacttcaaactgagtacctccgtctttcagtcttgcgacagcatagacgtgggtaaccggggcatcttcgttttctcccgggcggtgtattaacttttcatcaaggccaaattcgaagctaaactcgtcaccttcacggacaacacgggctgacaggctggcgatttgaccagaacggcgagccagatcaatcatgccgcgatagccaatgattagctgaacgttctttttaccgctcttttcgtttttattaccaaaaggcagtaaatatgcatgaccgagggcgctacctggctcaagtccgagctgtgaacactgtacgatcgcactgacaaaactcatagtgtcacagtttcctaacgccggaactttacgaatttctgtggtggcgatacggatcatacgttcagccgtcatatggcgtggaagagctgctgccagttgctctttcattgatggctggttaataaaactaatcacgtcgctatttttaactgctgctggtgcacggtttccctgagttttttgcagatcggcttttgcgattggtggttgcttagtcatttgcatattccttagcccagcggggcagtgataatgtcttaatagctggccattcatcggtattcaggcagtcagacagggttcgcagattgcggtgatattcctgttgacctgccagttttgcttcttcgcccatcatgaaaatttcaaccggataacgtccgcattcaatagttgtgctggcaaccagaaaaacgaaagttggctgcactccaaactgtgcttcataaccgtcactgtagaatgcatcctgaacgtgatagcggtagtcgtaataagcggttttgaatcgttgaatatccgccgtagttttcacgtccatgatccagtgaaattcagggataattttgtccggacggcaccgacacaaaattcctgtttcaggatcttcccagtaaattgatgattcagcgtgtccggcgctttcaacaagccattgccccagcggcaaagccataacgctttgatacatgagttcaattttccggccttcttccgcagtgataaccgtttttcctgtgcttgcgcattccatcagaaacgctttctcttcttcttttccggcgtttgtacggcggttaaattcaggtgctacgataaagcggttactgaattcttccggttcaagtacccggcagtggaaagcagttcctaaatcgagcgtttttgtctttgtggtgtccacgggggcatttttacgccacaaatatagtgccggagtatcagcaatgtcatcgagctgagacttactgataccgggacccgcgtggtaattctcattcgaaattccgtaataaatacctggctctatgtcttctacgattacgggatctgcgacttcgccagtttcatcactgcaatcgcgatgcggatcgctgccagcattctcattgtgcggatgttcagcgccttccatttcctccggatcattttccttagcttcaacctgactctcttcatcgaatgtttcctggtatgttgcgtcgcccatcaccgcaccacagtcagggcagttatccccgccagtctggccgcaggcattgcaggctatttccggttcctgttgcactactggctcaggttgattcatatctgggctggttttttccgtttctggctggttctggtacacacaatcgcgagtctggatcccctttacccatttcggatcgttcgggtcgctaattccgtcaacaaattcaccacgtgatgcagcaagcaatttatcgtcatcgacaggattttttgatggaatgtttttccgggcttcatggagttctgcccgcagttcctgatatttcgcatcaacagaatttacctgtgactgagcatccagcggctgcgtgtcctgatgatgttcagttgcgtccggttccattgtttcagcctctccctgttcaactgccgttgttccagatggttgcggtttttcttcatcatcctgttttccttcttctgttactcgctgcggcatcggggcagaggagcgaccgcaggcaatatccacgatttccggatcagggttggcatgatcggtttcagtcagtactttgttcagatattcagtgacgtgcgcggggatgacctcgatcccaattggtgcttcttttacggacgcaaccacgatggcgcgggaataatccagcccgccaggcatggtgatgaatttgtcgcggaaaacagaaaagggcggtttattttcagcgataatttcctcaatgcgtttagcgtgtgccggatgaaggttatagatgtccagatccattgaacgggccagtacgccagtggctacgtcgcgcgccagtgacgtcagatcgtgtacgaaaccttcgccgcgatcggtgaggtttccgccgccagcattagcaccggaagccgtgcgagtgatgtgtgaaacacgattacccttcatccactcttttgtcagcagtcctcgatcggtgtagtcagcgttcaggtatgcttcgaaaaaagcagttatcagtcccaggtttgaattaccaggattagggaaaactttgtcagtgtcacgaaccagtttgtggagttcgcgaatttccagcgggtcgagcaggctggttttgtgggaaacagccagggcagtaacagccggtagttcttcagcccgagcaatgtgtaatgcctggagtccgtcgcgtgaaacgtgcgttaccggtttttcgctgccgtgttgagcaagccaacgaatgggcagttcctggccagaaattgggagtagcatattctcctcaatctcagtcatgtcttcgccgttgacgttggtattgccttgatagtgagcgttgtctggtgctgctcccggttttagttcccatgtcatggagtctttgctgagttgatagcgttcactccaggtaaaatcgatctcaccttcagcgggcaggtcattaacgacaggaaaattcgtggcaacagctttaaaatagctgctcagttttttacctgacttaacgatcaggtagtccagagtggcacaggtcgattcaaaatcgttgcttgcccacaggacgacgtcaggttcaccggatgattttttcgctttccgtaacaggaagagtggttttgtgctcattgttttttaacctcaactcagattaaaattcgttttgttcagtgaatgatcttgccggatacacactgttcatagcctgcgccatacgcaggctatttctttcagatttcaccttttaatttcattgcaattagagttgccagaaattcggcttttttttctgcgggcagattctttccgatatgcaccaggcacatttttttgacaccttcatcaagtgtttttacgttgcctgatggaccatcgatatcaaccacagtgaatggggtttctttattttctgttttaattacgtagccaatgcgctttccttccagattcacctcgtgaacaatgtcatcggtagttacaacagtggcttcataattggtaatcatgtttttctccttaattaaggttgagcgaatacctgccatttctggcataaattcagtttcgaatagtcaattaattaaagttcatgtgccatctggtctttttcggcacaagcttcactgcaatattttctcggttcgtcttttgataaaatcccgtgcatgaagtgaagcattctttcaatagctttgctttcttcaacgtcttttttgcaaaggtggtaagcacattttattttcttagtcatcaccatgactccgcctttacaggtaaaccatcacgaccgaggaagactttaatcatgcggtcagtaatgaatgtttttgtggtcaggttacgaatatatagttttcgctttttaatattgtttgccgaggcaatatatgtccggccttcatgaagaacataatcgccaggagtcacacactgacgtggtatttcatcagttccgaagtgatgtgcaatcataattatctccatttttacaaatgaactttgttgatgcggtgtctggtgcctccaggtgactgcaaccagttaacaattacagtcggctttcccacccaaaccaataaggactaacatgacttttaactgtgccacgtgcgcttagccgcattcaccgcatcacaaaattcactttaaaaagggcggacatcagccgaacttcaagaaaaaaactgatgccgccaggactacacacagcaatgtcgttatttacaaccggaggcgcactcccaccatttaaatttaacagacaagaccgactctttatggatatcggaaatgcgccttcgtgttgtgcccggttttatttcaccacctccgggcttcggtggtctcggctatacccctacagcgagagcttgtgttaacatttcaatacccttacagttgagagttattgatatgttggatgtatttactccattgttgaaactttttgctaacgagccactcgaaagacttatgtatacgattatcatttttggtctcactctctggctgataccgaaagagtttactgtcgcattcaatgcttatactgaaataccttggctctttcagattatcgtttttgccttttctttcgtggtcgccatttccttctcaagattgcgagcacatattcaaaagcattattcattactaccagagcaacgagtattgcttcgtttatctgagaaagaaatcgctgtatttaaagatttccttaaaacaggaaatcttattatcacttctccttgccgtaacccggttatgaaaaaattagaacggaagggcatcattcaacatcagagtgatagcgcaaactgttcttattatctcgtcaccgaaaaatactcccattttatgaagttattctggaacagcaggagtagacgttttaatcgttagcttactgtgtgcttctccaaccatcggcgcgcaccagtttcggttttaaatgttttgcttttggtatacgtcatggcagtgaacgttccatcctggttggggaacacgccgcacaccagggattcgttgttgccgaggtcgattttttgcattttgcgaatctcacatcttgttgctacgtatagcgacttctgcctgccagagatcccagtcgttgctgcgtaaagcctgcacagcctggttgtaagtgataccgcaacaatccatcaaatactgaactacttcgtaatgcaccatcttatctctccccttaacgccgggtggcggaactaactgctgcactgcaaaatttgaatcccgccgtcatgttcatacgcctcgggctggctacttaaccccttaccactgcctggtaactcgaagtattgcccggcgttctgtggggcggggtgggtggtatgctggaactataggtaatgcctaattgattgtcaataggctatgcctaatgttttgagcgtaacctaataggtgatggcgacagcagaaagtgatgggggggttaaataacggaatccaggagttttccgtcagaccatataagtttaagttccagtttttgtgatgttctggcttttccgttcagattcaagagctttcagatacttacccactttcatttccatcgctgctatgtaggcgcgaacatcgtggtcaacccaatctggttctgtagcatttccagataacaggaaagctacaatcgctcttatttcatcagaggctgcttgataaaggttgtttatatctaaaagttcactttttgtatctgaattggtgggggttggtatggggtattcgttaagcccccaatgctctggaccaacaacatcagaaaagaaacgccataattctggaagtttatctttacttatagagcctttcttaatccagtcataaattgatggtggttggactttaaagtggcgtgcgacctccgcctttgatttgacggatcccgatgcgatttttttgttaatggcctgctctatcgctcggcctaagtctttaccactaagcattgcttaatattctcctatgcgcattacattaggcaatccctacccttactgcattaggcacagcctattgacaattgcgttaggcgtcgcctaatatttctgtgtgtttttggagttcattcgatgaaaaaagagaactattcattcaagcaagcttgtgctgttgtcggtgggcaatcagcaatggctaggcttttaggtgtatcacctccaagcgtaaatcaatggatcaaaggggtacgtcaattgcctgccgagagatgtccagcaattgaacgtgcaacaagaggtgaggttctgtgcgaagaacttcgtcctgatattgactggtcatatttacgacgttcggcatgttgttcgcagaatatgtcagtgaagcaactaaatgacagtaacaaatcctcatttgatcatacctgaaacatcaagaggcaaatgattcatgaaaatcaagcatgagcacatcgaatcagtgttgtttgccctagcagccgaaaaagggcaggcatgggtagccaatgcaattactgaagaatatctgcgccaggggggcggcgaattgcccctggttccaggcaaggactggaacaatcagcagaatatctatcaccgttggttgaaaggtgaaacgaaaacgcaaagagaaaaaattcagaagctgatcccagcaattctggcaatccttccgcgcgagctgcgtcaccgactctgcatcttcgataccctggaacgccgtgcattactggcggcgcaggaagcgttaagtacggcaattgatgcgcatgatgatgcagtccaagccgtttaccggaaagcgcatttcagcggcggcggttcttccgacgattctgtcattgttcattaagcaaaagtttccatgctgtttgtgcttattctaagccaccgggcagcatcatacggggcaattatggccgcattaccatacatgcaactgtacatagctgattacctggctgacaccatgcatttgtcagcagaggagcatggtgcgtatttgttgctgatgttcaattactggcaaacaggaaagccaatacctaaaaacaggctggcaaaaattgcccgtctgactaacgagcgatgggctgatgttgaaccatccttgcaggagtttttttgcgataacggcgaggaatgggtgcatcttcggattgaggaagatctggcatcagtcagggaaaaattaaccaaaaaatcagccgcaggaaaagcatctgttcaggccagaagaagcagaaaggaagcagatgttcaaacaaaacaagagagaaatttaacaggtgttcaaacagatgttgaagtggtgtttgaacatgatgtcaacacaaaggcaactaataaagatacagataaagatctaaaaacagatccccccctaaatcccccccgggggaatcgaggtgtcaaaaagtttgaccctctggatattactttgccgaactggatttctgtctcgctttggcgtgagtgggttgaatttcgccaggcattgcgaaaaccgattcgaacggagcagggcgctaacggggcgatacgggagctggaaaaattccgccagcagggtttttcacctgagcaggtgattcgacacagcatcgccaatgaataccagggcttgttcgcgccgaaaggtgttcgacctgagacgttactccgacaggttaacaccgtctcgttaccggatagtgcgatcccgccaggcttcagggggtaactgaccatgaaaaatattgcgacaggcgatgttcttgaacgtatccgcagactggccccgtcacatgtaaccgcgccattcaagacggtagcggagtggcgcgagtggcaactttccgaaggccagaaacgttgtgaggagatcaaccgtcagaatcgtcagttgcgggtggaaaaaattctgaatcgctctggcatccagccattgcaccgcaaatgctcgttttcgaattaccaggtgcagaacgaagggcagcgatacgcgttgagtcaggcgaaatccatcgctgatgaactgatgaccgggtgtacaaattttgcgttcagcggaaaacctggtaccgggaagaaccacttagcggcagctatcgggaatcgcctgctgaaagacggtcagacagtgattgtggttaccgtggctgatgttatgagtgccctgcacgccagctatgacgatgggcagtcaggcgaaaaatttttgcgggaactgtgcgaagtggatctgctggttcttgatgaaattggcattcagcgcgagacgaaaaacgagcaggtggtactgcaccagattgttgatcgccggacagcgtcgatgcgcagcgtggggatgctgacaaacctgaactatgaggccatgaaaacattgctcggcgagcggattatggatcgcatgaccatgaacggcgggcgatgggtgaattttaactgggagagctggcgtccgaatgtcgtccagccaggaattgcgaagtaatttttaccgggagaaaaatttaatggagactgtttttgacgcactgaaagcaatgggaaaagccacatccatagaacttgctgcgcgacttgatatcagtcgtgaagaagtgctgaacgaactatgggaactgaaaaaggctggttttgttgataaaagcgcgtacacctggcgtgtggctgataacaatgttcagcaggaacagccagcgcaggcagaactgccggaagaaatcaccacagcaacagtagcgaaaatctcagagtgcgatttaaccgcgacgattgaacaacgaggaccacaaacggctgatgagctggctacattgtttggtaccacatcacgcaaagtggcttcaacgctggcaatggcaatcagcaaaggtcgtctgattcgcgtaaatcagggcggtaaatttcgttactgcataccgggcgataatttaccagcagagccgaaagcagcatcggtatctccgctctggttatctgcatcgtcgtctgcctgtcatggggtgttaatcattaccgtgataacgccatcgcctacaaagaacagcgcgacaaaaatgccagagaactgaagctggcgaacgcggcaattactgagatgcagatgcgtcagcgtgatgttgctgcgctcgatgcaaaatacacgaaggagttagctgatgcgaaagctgaaaatgatgctctgcgtgatgatgttgccgctggtcgtcgtcggttgcacatcaaagcagtctgtcagtcagtgcgtgaagccaccaccgcctccggcgtggataatgcagcctccccccgactggcagacaccgctgaacgggattatttcaccctccgggaacgactggtaatgatgcaggcccaacttgaaggtgctcagcaatacataaccgagcagtgtttaaagtaaaatcttaactacaatatgattcattttgatgattgtttcataaggaacagtgaagtaagatctaagaggagttaaattttatacagtataatcataatattgcagcaaggtggttataattgaaagaatatttagatatgaatacatctcatgtaagagttgttactcatatgtgtgggttcctggtttggctctatagtctttcaatgttgccaccaatggttgtagcattgttttataaagaaaaaagcctgtttgttttctttataactttcgttatatttttttgcattggtggcggagcgtggtatacaactaagaaatctggcattcaattacgtacccgtgatgggtttattataattgtaatgttttggattttgttttctgttattagtgcattccctttatggattgactcagaacttaatttaacgttcattgatgctctgtttgaaggggtttctggaataacaacaacaggagcaactgtaattgatgatgttagttcattacctcgggcatatttgtactatcggtcacagttaaattttataggtggtttaggagttattgttctggcggttgctgtattgccattattgggtattggtggtgcaaagctttatcagtcagaaatgccggggccatttaaggatgacaaactcactccccgcctggccgatacgtcacggacactgtggataacttattctttattaggtattgcttgtattgtctgttatagacttgcaggaatgcctttgtttgatgctatttgtcacgggatttccacagtttcgcttggtggtttctcaactcatagcgagagtatcggatattttaataactatttggttgagctggtggctggttctttttccctgctatcggctttcaacttcactctttggtatattgttattagcaggaaaacgataaaacctttaatcagagatattgaacttcgtttctttctgttaatagccttaggggtgatcattgttacctctttccaggtctggcatataggtatgtatgacttgcatggaagttttattcattcgttttttcttgccagctccatgctcactgataatggtttagctacgcaggattatgcaagttggcccacgcacacgatagtgtttttgctgttgtcaagtttctttgggggatgtataggttcaacttgtggtggaattaagtcacttcgatttcttatacttttcaaacaaagcaaacacgagataaatcagctttctcatcccagagcgttgttgagtgtaaatgtaggagggaagatagttacagatcgtgtaatgaggtctgtatggagtttcttttttctttatactctcttcacggtgttttttatactggtgttaaatggtatgggatatgattttcttacatcatttgcaacagtggctgcatgtattaataatatgggattaggttttggggctactgcatcgtcattcggagtgcttaatgacattgcaaaatgcttaatgtgcatagctatgattcttggtcgccttgaaatttatcctgttattatattgttttcaggttttttttggcgctcctaatatatggctgatttataattgtgagtttaatattatgttgactcactcattgatccaatacctaactttaccagcaacacctccgtccccagtagcactggctgctggggtgcgttttattcataaagcaaggctgtatgagcgagaaattaaagatagtctatcgcccattacaagaattgtcaccgtatgcgcacaacgccaggacgcacagtactgagcaggtggcacaactggtagaaagtattaagcaattcggctggactaatccggtgctgattgacgaaaagggcgaaattattgcgggtcacggtcgtgttatggcggctgaaatgctcaaaatggattctgttccggtcattgttctgtctggcctgacggatgagcagaagcagcgataacgatcagtatcgctcccgtaatgcattaatccgtcgccacattgagaaaatggatgccagtttgcacgtcggaacgaaggagtttgatatttcaaaggtttccgaggtggattctgttgatgatttactcattgataatgccgctcgttatctgctgaaagactggaaaggggttggtgaactggttaatggtgttgaggttgcactggaatatacggcagaacgagggatcgcgctgcttaagcagaatccagagttgtactggcagatccttgcagaagcagccagcatcgcccagggtaaagagcagcagaagcaggatacgataaaaaagccatagctgcccagcggtggttatcggagttcgggggagaaaggggggaaaaggcaagatggaagcgagaaaaactcaggttgccaccgataccggaaccagaaatagacccggtgcttaaggagttgttgtacgcctattcggtaatatcccgtgcccgacgttatgctggaatggctggggtgcctttgcctttatctctgacagagataaatgaatatttagccactcatccggtattgattgagcgcgatgaatttgaagcagtgatctttgcactggatgaccagtattttcaggagcagtgtgtgtagttgttaattacgtacactctgttacagagatgtgatggtgtctttaattaaatcgatgatgctcctggagaaaagcattgcgtggcctcgtaatcgctatatctactattatgtcgcctgaaacccacttcgcggtgggttttttgttgtcaggagttttaataaatggcagagcaaacctcgcgtctcgcaataattattgatagcactggagcgaaaaataatgctgacaatctgacctcctcattagtcaaaatgacgcaggctggggaaactgctgcaaatagcgcagggaaagtgactaaggcaacagaagatgagaagaacgcgctcgcaaaattaaaagcagctattgatccagttggtgccgcaattgatactgtcggtcgacgctattctgaattaaagaaatttttcgataaagggcttattgataaagaagaatatgaatttcttgtccgtaaacttaatgaaaccacagaggaattgagcggggttgcgcaagcgcagagagaagccgagaaggccggaaaacttgctgccgctcagcaggaagcgcaggctcaggcctttcaaagaatgctggacaagatcgaccctctggctgcggcgctaagaaatcttgaacaacagcatgatgaacttaatgctgcgtttgcatccgggaaaataaatggttctcagtttgagaattatagccgaaaaatacaggaaacacggcgagagcttaccggagaggctcaggcagagcgagaagcagcaaaagcgcatgatgaacaggttgttgctttgcaacgtctgattgctcaacttgatcctgtcggaactgcttttaatcgtctggtagaacaacagaaacagctcaatgaagcaaaagctaaggggatgctttctcctgaaatgtatgaggagctttctggaaaacttcgtgctatgcggagtgagcttgaggttactcaatcacaattaagcaaaaccggaatgtcggcaaaacaaacggcttttgctatgcgcatgttgcctgcacaaatgacggatattgttgttgggttgtccactggtcagtcgccatttatggtgttaatgcagcagggcggccattcagctatgcaggagacaagaatcgccagcttacccgttacagcgatacccgctggcatgaagattccgtgcgtaaccgctggttcagcgtgatggtggggccgtctgtgcgcgtgaatgaatggttcagcgcgtatgcgatggcgggtatggcttacagccgtgtgtcgactttctccggggattatctccgcgtaactgacaacaagggaaggtgcgaataagcaggtcatttcttcccaagctgactcgctgattaaaatttcgcggatctgggccgatttttttcccgcaaacacatcgaatcagcctatttaggctattttttccaccatttctggcgttatttccggtttttactgagatctctcccactgacgtatcatttggtccacccgaaacaggttggccagggtgaataacatcgccagttggttatcgtttttcagcagccccttgtatctggctttcacgaagccgaactgccgcttgatgatgcgaaacgggtgctccaccctggcacggatgctggctttcatgtattcgatgttgatggccgttttgttcttgcgcggattctgcttcaaggtttttaccttgccgggacgctcggcgatcagccagtccacatccacctcggccagctcctcgcgctgtggcgctccttggtagccggcatcggctgagacaaattgctcctctccatgaagcagattacccagctgattgaggtcatgctcgttggccgcggtggtgaccaggctgtgggtcaggccactcttggcatcgacaccaatgtgggccttcatgccaaagtgccactgattgcctttcttggtctgatgcatctccggatcgcgttgctgctctttgttcttggtagagctgggtgcctcaatgatggtggcatccaccaaagtgccttgggtcatcatgacgcctgcttcggccagccagcgattgatggtcttgaacaattgacgggccagttgatgctgctcgagcaggtggcggaaattcatgatggtggtgcgatccggcagggcgctatccagggataatcgggcaaacaggcgcatggaggcgatttcgtacagggcatcttccatggcaccgtcgctcaggttgtaccaatgctgcatgcagtgaatacgcagcatggtctccagcggatagggccgtcggccattgcccgccttgggataaaacggctcgatgacagcggtcatattctgccatggcagaatctgctccatgcgggagaggaaaatctcttttcgggtctgacggcgcttagtgctgaattcactatcggcgaaggtgagttgatggctcatgatgtccctctgggatgcgctccggatgaatatgatgatctcatatcaggaacttgttcgcaccttcccaaggggaaaacgcacgacgtgctgaccggaagtgatgacggtcgccacagcaacacgtctctggcgtggggagctggcgtgcagtttaacccgaccgaatccgtggccattgatattgcttatgaaggccccggcagtggcgactggcgcactgacggtttcatcgtgggtgtcggttataagttctgattagccaggtaacacagtgttatgacagcccgccggttcaggcgggcttttttgtggggtgaatatggcagtaaagatttcaggtgtactgaaagacggcacaggaaaaccggtacagaactgcacaatccagctgaaagcaaaacgtaacagcaccacggtggtggtgaacacgctggcctcagaaaatccggatgaagccgggcgttacagcatggacgttgagtacggtcagtacagcgttattctgttggtggaaggattcccgccgtcacatgccgggaccattaccgtgtatgaagattctcaacccggtacgctgaatgattttctcggtgccatgacggaggatgatgcccgtccggaggcactgcgccgttttgaactgatggtggaagaggtggcgcgtaacgcgtccgcggtggcacagaacacggcagccgcgaagaagtcagccagtgatgccagcacatcagcccgtgaggcggcaacccatgcggctgatgctgcggactcagcacgcgcagccagcacgtcagccggacaggccgcgtcgtcggctcagtcagcgtcttccagcgcaggaacggcatcaacaaaggccactgaagcatcaaaaagtgctgccgctgcagagtcctcaaaaagcgcggcggccaccagtgccggtgcggcgaaaacgtcagaaacgaatgcttcagcgtcactacaatcagcagccacatctgcatccaccgcgaccacgaaggcatcagaagctgcgacctcggcccgggatgcggcggcctcaaaagaagcggcaaaatcatcagaaacgaacgcatcatcaagcgccagtagtgcagcttcctcggcaacggcggcaggaaattccgcgaaggcggcaaaaacgtccgagacgaacgccaggtcttctgaaacggcagcgggacagagcgcctcggctgcggcaggctcaaaaacagcggctgcgtcgtctgccagtgcagcgtcaacaagtgccgggcaggcctcagccagtgccaccgccgccggaaaatcggcagaaagcgccgcatcgtctgcttcaacagccacaacgaaggctggcgaagccactgaacaggccagcgcagcagcgaggtctgcttccgcagcgaagacatccgaaacgaacgcgaaagcgtcggaaacaagcgcagaatcctcaaaaacggctgccgcatcgtcagccagttcggcggcgtcatcggcatcatcggcgtctgcttcaaaagatgaggcgaccagacaagcgtcagcagcgaagagcagcgccacgacggcatccacgaaggcgacagaggctgctggcagtgcgacggcggcagctcagagcaaaagtacggcggaatccgcggcaacgcgcgccgagacagcagctaaacgggcagaggatattgcatccgccgtggcgcttgaggatgcaagtacgacgaaaaaggggatagtacagctcagcagtgcgaccaacagtacgtctgaaacgctggcggcaacgccaaaggcagtaaaatcagcctatgacaatgcagagaaacgtctgcagaaagaccagaacggcgctgatatacccgataagggatgcttcctgaacaacattaacgcggtcagtaaaacagactttgctgataagcgtggtatgcgttatgtgcgggttaacgctcctgcaggtgcaacatctggaaaatattaccctgttgttgttatgcgttctgctggctcagtaagcgaactggcatcaagagtcattatcaccacggcaacgcgaaccgcaggcgatccgatgaataactgcgagtttaacggatttgttatgcctggtggctggactgacagggggcgttatgcttatggcatgttctggcaatatcaaaacaatgaacgagccattcactcaataatgatgagtaataagggcgatgatttgcgctctgtgttctatgttgatggcgctgctttccctgtttttgcgtttattgaagatggcctgtcaatatccgcacctggtgctgatctcgttgttaatgatacgacctataagtttggggcaacaaatccggcgactgaatgtatcgcggcggacgttatccttgattttaagagtgggcgtggtttttatgagtctcattcgttaatcgttaacgataacttgtcgtgcaaaaaactttttgccacagacgaaattgtagcgcgtggtggtaatcagattcgaatgataggtggggagtatggtgcattatggcgtaatgatggcgctaaaacttacctgctgcttaccaatcaaggtgatgtttatggtggctggaatacattaagaccgtttgctattgataacgcaaccggcgaactggttattggaaccaaactgtccgcaagtctgaacggtaatgcattaacagcaacaaagctgcaaacgccaagacgggtttctggtgttgagtttgatggttccaaagatattactttaaccgccgcgcatgtggctgcttttgccagaagggcaacggatacatatgccgatgcggatggtggcgttccatggaatgccgaatctggcgcttacaatgtcacccgctctggcgacagctatattctggttaacttctataccggagtcggaagttgccggaccctgcagatgaaggcgcattacagaaatggtggtctgttctaccgttcttcaagagacggttatggttttgaggaagactgggcagaagtttatacctcgaaaaatcttccaccagaaagctacccagtcggcgcaccaatcccgtggccatcagataccgttccgtctggttatgccctgatgcaggggcaggcttttgacaaatctgcttacccgaaacttgcagccgcttatccgtcaggcgtgatccctgatatgcgtggctggacgattaagggcaaacctgccagtggtcgggccgtattgtctcaggaacaggacggcattaaatcgcatacccacagcgccagcgcatccagtacagatttggggacgaaaaccacatcgtcgtttgattacggcactaaatccacgaataacaccggggcacatacacacagtgtgagcggctctacaaactcggctggagcacacacacactcactagccaacgtgaacacggctagtgctaactccggtgctggtagtgcatcaacaagattgtctgttgtgcataatcaaaactatgcaacatcatctgctggcgcacatacccactcactgtccggcactgctgcaagcgcaggtgcacacgcgcatactgtcggtattggtgctcatacgcactccgttgcgattggttcacatggacacaccatcaccgttaacgctgctggtaacgcggaaaacaccgtcaaaaacatcgcatttaactatattgtgaggcttgcataatggcattcagaatgagtgaacaaccacggaccataaaaatttataatctgctggccggaactaatgaatttattggtgaaggtgatgcatatattccgcctcatacaggtctgccagcaaacagtaccgatattgcaccgccagatattccggctggcttcgtggctgttttcaacagtgatgagtcatcgtggcatctcgttgaagatcatcggggtaaaacggtttatgacgtggcttccggcaacgcgttatttatttctgaactcggtccgttaccggaaaatgttacctggttatcgccggaaggggagtttcagaagtggaacggcacagcctgggtgaaggatacggaagcagaaaaactgttccggatccgggaggcggaagaaacaaaaaacaacctgatgcaggtagccagtgagcatattgcgccgcttcaggatgctgcagatctggaaattgcaacggaggaagaaatctcgttgctggaagcatggaaaaagtatcgggtattgctgaaccgtgttgatacgtcaactgcacaggatattgaatggccagcactgccgtagggtaaaacatataaattctataattagatgtatctttccatttacggcaaggaagggggcttggaagacgtaaagcatctcacaccgagattattttttatatgtcaggtgtctgaagttttgctttggctcttaaaatggtttgccgcgaggttttgaattcccgggcaatggcacttatacttacacctgacttaattcgttcgaataccacctgtttctgttcttcatttaacacaggaggtcgaccaaaacgtttccctgcgccgcgggctcttactatcccggaatgagtgcgttcaagtaaaaggtctcgttcaaattcagcgactgctgaaattacttgcatcatcatttttcctgttggactggtcaggtcaatgccacccaatgctaagcaatgcactctgatacctgtttcggtcagttgttccactgttttcctgatatccattgcattacaaccaaggcgatccagttttgtcacaatcaattgatcaccacatttcaggcgagcaagcaaccggttaaaaccaggacgctcactggttgctgctgagccgctaatgtgttcttcgattatttgctgaggtttgattttaaaacctgcactttcgatttcccggcgttgattttcggtggtctgatccagcgttgatatccgacagtaagcaaaaattcgagacatagtgagactctatacgaaattggtgttcatatcataatgcatctcagaaaataattatgattatttttgtgcatatttgtatgtacacgttcgaaaataaacgaatgcgtatgcaaccccgtaattttggtgagacccaaaatcgattttgtgaaaaatggctttaactcggtttgtttttcgagttccgggcggactcaaggaagaagaatagtgttgcgtgttattttaaccagatttcaagttgtttggtcgtggaaaagtggagcaaaatgttgttaaagtggaaaaatgataaaaaagtaagtttattatattacattttaccatttaaattttggttgtctttaagaactgatatcgctgtttgtaataattctttgttatccagccatgatgttttctttatgtttccttcaatgtaatcaagcaatgttctggtattgataggtcttccctgttttgctacttccactacagcatcccctaggataattcttacttcaggaagctgcgcagggaaccactttagggtgtcttttgatttcatgaagatattccttaaaatattattgattttcattgcgatattgtatgtctgattcaggatatgttgacttatacatcggttttgtctgggttattggatatgccaatccctaattttattagagcatgactaaaaatgctgaatatgataaggagcgaagtgattatcagtatgctgttcatatagcctcgaattagtaatgtgttatatatgatatagttgacaatttttatcctgggtgttcttaaagttcgtagataaacattgtcgtttcaggtatacaggaatgctaacaggtggcggcaaaaatcaggcggtttatggcgcaagctgaagtggcaactgcaaactatcttatgcagagactctacacggattgggtttaaaagtatacatagataacagtttttatctgaagaagaaaaatatcaaggtgatatagcctatatgcctttgatgcggaggaatgaatgtgatgggagtgatgtatctgaatagttgaaaaaccgcagtcacgtcgtatgcaagaacgtgctgcggttggtttgactttgattgagacgttttggaatttttttcggtggcaaaaatggggcaaaacgctgcaaaaggggcaaaaaaggggcaaaaaaagagtggattatcgtagcttattgttgtcgctgatgatatttaacacattgaaaaataagtaaaatacttatgagtcagagagttgtgatttttgcccttacttgttcaggttgtattgttctttcttactaatttcttgattttgcgacatttaaaagcgactcaattcgttatatggcatcagaagagtatgcgtcatgccggaacgcccagcataagaaatctgatataaaaaactgtggcgtgtatggtacggattagaggggaaaatgtcagcacatttgcgaaatgaatcaaaaagcccgcagcaatgtgcgggcgttagtgtcagcgcacaaccagcacggagcactctgcgtgacgcactacagctgcggcgttggaaccgagcagataagtggtgatatccggtcgatgggaagcaatgatgatcatatgagcggggatcttcttcgccaattccagaatgcggtctttgggcgagccttcctcaacatggacatgcactctgtcggttggcagtttaaattttttaatgatctcttccagttgcgatttggcttccgctttcaggtcatccattgccggtaattctgcggaatacgctaaacccagagaggcatagtagggcagtgaaggtattaccgtcaggaaatgaacctctgcatcatcaatctttgcctcttcctcaacgtggctaatcacgcgttgagttaattctgaatcggaaatatcgatagggacaagaatcgttctgttcataaaacctcctgttttagtatccgcataaagtgtaacgccagatgacactttttgtgtaatgacggagttcacatttttaatttagatcaaaggaggaagaataagcagaaaaagcccgccataacagcgggcaggaggatttagaactgataaaccagacctaaagcgacaatatcatcggtagagatgccattggcagcgtagaagctgtcatcttcatccaacaggttgattttatagtcaacgtaggtggacatgtttttattgaaatagtaagtcgcgccaatatcggcgtatttaaccagatctttatcatcaacacctgccgggttgtctgcaccacccgcagcgtgcaggtcacggcctttagacatcaggaaagagactgccggacgcagaccaaaatcaaactggtactgtgcagtgacttcaaaattctgggttttgtttgccacagcataatcgctgtcgccaaacggggtcatattacgcgtttctgaatacatggttgccaggtaaatattgttagcatcgtattttagcccagcagtccacgcgtctgctttatcaccacccgccgcagtatggttaacctggtcattggtgcggtcagaagaggtgtatgccgcaccagcgctaaagcccatgcctaaatcatatgttgtggaaagaccccagccgtcaccgttttcatggcgaacatcacgtccgttgttggtgccttcctgaccattactggctccttcgttgttaccttgatactgcaccgcgaagttcagaccatttaccagaccgaagaaatcagtattacgataagtcgcgacgccattggctcgaccagtcataaagttgtctgcattggtataagagtcaccgccaaattcaggcagcatatcggtccagccttcgatgtcgtacattacgccataattacgtccgtaatcgaaagaaccgtaatctgcaaatttcagcccggcaaatgccagacgggtccatgactggttttttgaagattcagtgttgtttgcctgaatattgtattcccattgaccgtagccagtgagttgatcgttaatttgggtttcgcctttaaaacccagacgcgcatagctctggtcgccatctttcgctgaattatcagaaaaataatgcaggccatcaactttgccatacagatctaatttgttgccgtctttattataaacttcggctgcatgtgcagcacctgcggcgagcagggcaggaattaaaagtgccagtactttgcttttcattgaataaatcctttagttattttatttgccttttatccccatttcggggagtgaaaacatcctaaaggagaagttcagttagccgataaatatcatttgttacgccttaagtaaaaccttaatcaaataattcctctgaaatgataataagtctggtgaatgtatcgaagataatacatacaaaataaaaattatacttttaatttgctatacgttattctgcgcgggttatatgcctttattgtcacagattttattttctgttgggccattgcattgccactgattttccaacatataaaaagacaagcccgaacagtcgtccgggctttttttttagaattggataatccttatccagagcatttaatcggtgttgcttttttccgcttttccggccatttgtgccaggaagtcatagcgtttttgcaaatcagctgcagcatctttccataactgttctgccacttctggctgctgcgaattcagccgacggaaacgttgctcgtgaagtaacgtttcttccggtgcttctgacggcgggcgtgaatccaaggccagcggcagtttgccttcatcggcacgacgcggatcaaagcgatatagcggccagaagccggtagctgtgagttggcgcatctggtcgtggctgagtgccagatcgtaaccatgctcttcacacgggctataagcaatgatcagcgatggccccggatacgcttccgcttcctgaatcgctttcaccgtctggttcagctgcgcgccgagagaaatctgcgccacataaacatgaccgtacatcatcatactgacgccaagatctttacgcgctttacgtttgccgtgctcgccaaatttagttactgcacccagcggtgtcgctttcgacgcctgaccaccggtgttggaatagcattgcgtatccagcaccagaatgttgacgttttccgtcaaactcaatacatgatccagaccgccaaagccgatatcgtaagcccagccatcaccaccaatcagccagattgatttttccaccagtgcatctgcatcacgtagcagttcatgtgcttcggcaacatcgttgagttgctggcgtaaagctgcaacctgttcacgacgaacctctggcgtggcgtctgatttcaacgccgtcagtaattccgccgggattttatcggcaaattgatccagcagacgcagcacgcggacacggtgttgatcgaccgtcaggcggaaaccaaggccaaattcggcattatcttcaaatagagagttcgcccatgccggcccacgaccgttggcatcggtggtatacggtgtagagggcaggttaccgccataaattgaagaacagccagtggcgttagcgatcaacatccggtcgccatagagctgagtcagtaatttaatatacggcgtctcgccacaaccggagcaagcacctgaatattcaaacagcggtgtaatcagctgcgatgtacgaatatcaatacgttccagtttgctacggtcgatttctggcaggttgaggaagaaatcgtaattgattttctcttcttcgacatgttccaggcgagacatcatattgatggctttaatctctggattctgacggtctttcgccgggcaaacttcgacgcacaggttacaaccggtgcaatcttccggtgccacctgcaagacatatttctgcccgcgcatatcacgcgatttcacatccagcgaatgcaggctggcaggggcgttttccatcgcttcaggcggcaccacttttgcgcgaatagctgagtgtgggcaagcggcaacgcagtggttacattgggtacagagttcctctttccagatggggatctcttcggcgatattgcgtttttcccagcgcgtagtgcccatcggccaggtgccgtctggcggcagcgccgaaacggggagggcgtcaccaagcccggcgagcatcgcagcggttacggttttcacgaaatcaggggcggcatcggaaaccactggcggtcgattggcgctgtgcggatttaccggttgcaacggaacttcttctacggattcacgcgccagcgccagagcctgccagttgcgttccaccagatcctggcctttgctactgtaacttttggcaatcgcaccctgcaattctgcgagggcgctatcgccaggcagaatttgcgtcagatggaaaaaagccatctgcatgacggtattaatacgggccgccaggccacattcgcgggcgattttcgccgcgttaatcacatagaagcgcgcttttttctggtttaacacggcctgaacttcttgcggcaagcgcgaccacacttcatctgcgctgtacggcgtgttgagcaggaaaatgccgccaggttttaaacgctcagccatctgatatttatcgataaactgcaactggtggcagccaacaaaatcagcctgggaaatgagataagcggaacgaatcggctgttcgctcactcgaaggtgagaaaccgtcaggccgcccgcctttttggagtcgtaaacaaaatagccctgtgcgtaccacggcgtggaattaccgataatcttgatattgtttttggtcgcggaaacgctgccatcactaccaaggccataaaacaaggcttccagtttcgccgagtttggcagggtgttttccggcaacggcagtgacagattggtcacatcatcgtaaataccaaccgtaaagcgcgctttcggtttagccgcgttgagctcggcaaataccgccagtacacagtctgggccaaattctttggatgaaagaccatagcgcccaccaatgacacggggcagagtttcgcgctcgccattattaaaggcttctgccagtgcggtcattacatccagatagagcggttctgcctgggcaccgggttctttggttctgtccagtaccgccacgctgcgtacggatcccggcagagcttgcagtaaatgtttagcggagaaggggcggtacaggcgaactttcagcacgccaactttttcgccacgggttagcaattcatcaaccacttcttcacaggtgccaatggcagagcccatcaggataatcacccgttccgcttgcggatgcccgtaatattcaaacggctgatactgacgacctgtcgcggcagagaaatcattcatcgcctgttcaacatggtcatagaccgcgttgtaccatgggttggtggcttcgcgagactggaaataagtgtcaggattggcggacgtaccgcggatcaccggatgttccgggttgagtgcccgggcgcgatgagcatcaatttcgacctgcggcatgagatcaagaatcgtgtcatcggccagcgggacaattttattgatttcgtgggacgtgcggaaaccatcaaagaaatgaataaatggcacgcggcttttcagcgtcgcgatttgcgaaatgagagcaaagtcttgcgcttcctggacgtttgctgcacacaacatcgcgcaacccgtctggcgcaccgccataacgtcggaatgatcgccaaaaatagagagtgcatgtgtggcaacggtacgtgccgctacatgcaggacaaacggtgttagttcgcctgccagtttgtacagcgtcgggatcatcagcagcaaaccctgcgatgacgtaaacgatgttgaaagggcacccgtctgcaaagcgccatgcacggtagcgatagcacccgcttccgactgcatttcaaccacgcgtggtgtgtctccccaaacgttctttaagccgtttccggcccaggcatcagcctgttctgccatcgtggaactgggggtaatagggtagatggcgataacttcactggtgcgaaatgcgaccgaagcaaccgcgccattaccgtcaatagtaatcatatgacacccttacattgcgcaaatgaggggcgcacgaaattgctgcgcgcccagtagtaatctttcaattttagcaaatggctttcttctgcattttcgcttttgtgtcccccacatcagcgtaatgaatgttttgatcaaacagagggcaaaaaaatagccataaaaaagtaaaaatgcggggcaacgcgcaggacagctctcgacgccgccctctgtgctgcctattatttatggcggtgtcgtttggcttgaagatcagaggaagaaaagatgcgagcagcgttttgggtagggtgtgccgctttattgttgtcggcgtgtagtagtgaacctgttcagcaggcgactgccgcgcacgtagcgccaggtttaaaagcgtcgatgtccagtagtggagaagcaaattgtgcaatgatcggcggttcgctttctgttgcccgtcaactggatggtacggcgattgggatgtgtgcattacccaacggcaaacgctgtagcgaacagtcacttgccgccgggagctgtggcagctattaattcattaaatccgccagcttataagttaatgtctgttttgcggtcgccagcgttaactggttcgcggtcagatccacttgtgcaccttctttcagcatttcgctaatggtgttatcgagttcattaagctgcgggttagcgcacatcatacgggtcattgccagccctttggctgtcagttcaccattagacagtttgccttcaccgctaaagcggttacacatgctgccggaaatcatcattttttcaccaaagctgatttctggcggatttttatcgctggtcacgggcttaccgtttacgctttccagcacaaagcgatgatgctgtagctgttctggcgtaacagcaattttgtcattacttacacatcccgccatcagcaggcttagcgcaacaaacgcggctactttcttcattgtggttctcaattacagtttctgactcaggactattttaagaatagaggatgaaaggtcattggggattatctgaatcagctcccctggaatgcaggggagcggcaagattaaaccagttcgttcgggcaggtttcgcctttttccagattgcttaagttttgcagcgtagtctgagaaatactggtcagagcttctgctgtcaggaatgcctggtgcccggtaaacagcacgttgtggcaggcagacaggcgacggaatacgtcatcctggatcacgtcgttggatttatcttcaaagaatagatcgcgttcgttctcatacacgtccatacccaacgaaccaattttctgatttttcagcgcttcaattgctgcctgagaatcaatcaatgcaccgcgactggtattgacgatcatcacgccatttttcatctgttcgaaggcggcttcgttcaacagatgatagttttccggtgtcagcgggcagtgcagagagataacgtctgattcagagaacagggttggcagatcgacatactccacaccgagttccagcgccgctgcacttggatacggatcgaacgccagcagacgcataccaaaacctttcagaatgcgcagcatcgccacaccgattttaccggtaccgataacgcctgccgttttgccatacatagtaaagccggtcagaccttccagagagaagttagcatcacgggtacgctgatacgcgcggtgaatacggcggttcagcgtcatcatcataccgatggcgtgttcagcaacggcctctggatcataggctggaacacggactactttcagccccagttcttttgccgcgtcaaggtcgacgttattgaaaccggcacagcgcagggcgatatatttaacgccgtgctttttcagctcttccagcaccgggcggctgccgtcatcgtttacgaaaatacataccgcttcgcagccattggcagttttagcggttttttccgtcagcagaaagtcaaaaaattccagctcaaagccaaaggactcgttcacctgttgcaggtacttcttgtcgtactgttttgtgctataaacggcgagtttcataagactttctccagtgatgttgaatcacatttaagctactaaaaatattttacaaaatttcaaatttaattgaaagctatggcgatattgaaaaattcatcaacaactatgcttagtgtaggcgcaaccttcaactgaacggttaaacatgccacaatacccgtattgaatgcttaatttttcgctaaatcaggatattaactacccatgctgggtaaatataaagccgttctcgcgctgttattactgattattcttgtgccgttgacgctgctgatgacgctcgggctgtgggttcccacgctggcgggcatctggctaccgctcgggacacgtattgcattagatgaaagcccacgcattacgcgtaaaggtttaatcattcccgatctccgttatctggtgggagattgtcagcttgcgcatatcaccaacgccagcctttcacatcccagccgctggttattgaacgtcggcacggtagaacttgattctgcttgtctggcgaaattgccgcagacggagcaatcgccagccgctccaaaaacactcgcgcagtggcaggccatgctgcctaacacctggatcaatatcgataaactgattttttctccctggcaggaatggcagggaaaactctctctcgcattaacctctgatatccagcaactgcgttatcagggcgaaaaagttaaatttcaaggccagctgaaagggcaacaacttacagtcagcgaactggatgtcgtcgcgtttgaaaatcagccgccggtaaaactggtgggggaatttgctatgccgctcgtgccggatggacttcctgtaagtgggcatgctactgcgacgttaaacttgccgcaggaaccgtcactggtggatgccgagctggactggcaggaaaatagcgggcaattgatcgtgctggcacgggataacggcgatccgttgctcgatttgccgtggcaaattactcgtcaacaattgaccgtaagcgatggtcgctggagctggccgtatgcaggttttcctttgagtggccgactgggtgtcaaagtcgacaactggcaggcagggcttgagaacgctctggtcagcggacgactgagtgtgctgacccaggggcaagcgggtaagggcaacgcggtgcttaattttggcccaggaaaattaagcatggataacagtcagctgcctctgcagctgaccggtgaagcgaaacaggcggacctcattttatatgcccgtttacctgcgcagctaagtggaagtctgtctgacccaacgctgacctttgagccaggcgcgttacttcgttcaaagggaagagtcatcgattcgctggacatcgatgaaatccgctggcctttagcgggtgtaaaagtcacccaacgtggtgttgacggacgtttgcaggccatcttgcaggcgcatgaaaatgaactgggcgatttcgtgctgcatatggatgggctggcgaatgattttctccctgacgctggccgctggcagtggcgctactggggaaaagggagttttacaccgatgaatgccacctgggatgtcgcaggaaaaggtgagtggcatgacagcacgattacgctgaccgatctctccaccggtttcgaccagttacaatacggtacgatgacggtagaaaagccgcgattaattctcgacaagcccatcgtctgggtacgtgacgcacagcatccctcctttagcggcgcgctgtcactggacgccgggcaaacgctgttcactggcggcagtgtgttaccgccatcaaccttaaaatttagcgtcgatgggcgcgatcctacctatttcctctttaaaggcgatttacatgctggtgagattggcccggttcgggtaaatggtcgctgggacggtattcgtctgcgcggtaacgcctggtggcctaaacaatcactgaccgtattccagccgctggtgccacccgactggaagatgaacttacgcgatggtgaactgtatgctcaggttgcattttctgctgcgcctgaacaaggattccgcgcgggaggacacggcgtgttgaaaggcggtagtgcctggatgccagataatcaggttaacggtgtcgattttgtcctgcctttccgttttgccgatggagcctggcatctggggactcgcggccccgttacgttgcgaattgccgaagtgattaatctggtgacagcgaaaaatattacggctgatttgcaagggcgttatccgtggactgaagaagaacccttgctgttgactgatgttagcgtcgatgtgttaggcggtaacgtactgatgaaacaattacgtatgccgcaacatgacccggcgctgttgcggctgaataatctctcatccagcgaactggttagcgccgtcaatccgaaacaattcgccatgtccggggcatttagtggtgcactgccgttatggctgaacaatgaaaaatggattgtgaaagatggctggctggcgaatagcgggccgatgacattgcgactggataaagacactgcggatgcggtggtaaaagacaatatgactgcgggttcagcaattaactggttgcgctatatggaaattagccgttcatcgacaaaaattaatttagataatctcggtttattaaccatgcaggccaacattacaggtaccagtcgcgttgatggtaaaagcggtacggtaaaccttaattaccatcatgaagagaatatttttacgctgtggcgcagtttacgctttggcgataatctccaggcatggctggagcagaacgcacgtctgccgggaaatgactgtccgcaaggaaaagagtgtgaggaaaaacaatgaaaattttactggctgcgttgacgtcatcttttatgctggttggctgtacgcctcgcattgaagtcgctgcacctaaggaaccgatcactatcaatatgaacgttaaaattgagcatgagatcatcatcaaggcagacaaagatgtcgaagagctgcttgaaactcgtagcgatcttttctgaggtgatgatgaagaaaacattacttctttgtgcgtttcttgttgggctggtaagcagcaatgtaatggcattgactctggatgaagccagaactcaggggcgggtaggtgaaacattttacggttatctggttgcgctgaaaacggatgctgaaacagagaaattagtagccgacattaatgccgaacgtaaagcgagttaccaacaactggcaaagcaaaataatgtgtcggtagatgatatcgcgaaactcgccgggcaaaagctcgtagctcgggccaaaccgggggaatatgtacaagggataaacggtaaatgggtgcgaaaattttaatagcaaaaccgcaatatcgggataacgctacaggagaaggcgattgatctattttcctgaaacaaggtgaatattcaaaaactcctgtcaaattgccttttgccctgaaaaatgcatagtcaaatatctgttttaactaattggcgttgcagtacatgcaacgccaattagttagcggaatttacgtcgatactcgcctggcgtcatcccaaagcgttgcttaaataccgttgaaaaatgactctggtcagaaaatccccaatgaaagccgatgcctgccagtttttcatcatctgcggcatggcgaatcgcatctgcacaaaaatcgagacgacggttacgaatatattgcgcgactaccaaacctttatcggcaaacattcggtacaaactacgtactgacatacctgtctctccggctatccactccgggcgtaatatctcttcgcgaatattatcgtctatcaacgtaaccactttttgaaactgacgttcacgacgaggttgaacagattcccgctgatgaagtaccgggcgcagcagacacaccatcgcctgtagcgcagcttcactttctgtttcagaaagtgccggattattcatgctctcctgtaacaggcgatgactgagttgcaccatgggtaagtcagcgtccagtctttctgcgcagataggtttttgatggggaaaatattgttccagcagagtgcgtggcaaaagtaatgaaatctgtttagaagactcctgccagtaaagcgaacaggggcgtgaggcatcgagtaacgtaatatcgccagcgccaatctgcacctgacgctcatcctgctccattattgcctgaccactaagctgaaaaacggtgtaaaaccaggcatcgtcgctgccttttacttcctgccaggtgcgggataaattcaccccgctggttgtcacggtactcagctttagtcctttggcaaaatgcgtgtccagtacacccgtgtaacgctcagtcagcaggcgtccggtaaaatttccgcatacctgattgatttgggaaagccattgctgaaactcattatccactgcggggttcatggcacgttttcgctctgtgaaatgtatttttattgttgcatttgtgttgcaataaacgaagctaatgagcctgactataggaaataagtcttgtcaggcatagagacataagcggttattgtcacgatttgcggagcttgtcacagctgacaaagcgaatgtcacagcgaaaaaagtgacttttcttgtcgctgcgtacactgaaatcacactgggtaaataataaggaaaagtgatgacagagccgcatgtagcagtattaagccaggtccaacagtttctcgatcgtcaacacggtctttatattgatggtcgtcctggccccgcacaaagtgaaaaacggttggcgatctttgatccggccaccgggcaagaaattgcgtctactgctgatgccaacgaagcggatgtagataacgcagtcatgtctgcctggcgggcctttgtctcgcgtcgctgggccgggcgattacccgcagagcgtgaacgtattctgctacgttttgctgatctggtggagcagcacagtgaggagctggcgcaactggaaaccctggagcaaggcaagtcaattgccatttcccgtgcttttgaagtgggctgtacgctgaactggatgcgttataccgccgggttaacgaccaaaatcgcgggtaaaacgctggacttgtcgattcccttaccccagggggcgcgttatcaggcctggacgcgtaaagagccggttggcgtagtggcgggaattgtgccatggaactttccgttgatgattggtatgtggaaggtgatgccagcactggcagcaggctgttcaatcgtgattaagccttcggaaaccacgccactgacgatgttgcgcgtggcggaactggccagcgaggctggtatccctgatggcgtttttaatgtcgtcaccgggtcaggtgctgtatgcggcgcggccctgacgtcacatcctcatgttgcgaaaatcagttttaccggttcaaccgcgacgggaaaaggtattgccagaactgctgctgatcacttaacgcgtgtaacgctggaactgggcggtaaaaacccggcaattgtattaaaagatgctgatccgcaatgggttattgaaggcttgatgaccggaagcttcctgaatcaagggcaagtatgcgccgccagttcgcgaatttatattgaagcgccgttgtttgacacgctggttagtggatttgagcaggcggtaaaatcgttgcaagtgggaccggggatgtcacctgttgcacagattaaccctttggtttctcgtgcgcactgcgacaaagtgtgttcattcctcgacgatgcgcaggcacagcaagcagagctgattcgcgggtcgaatggaccagccggagaggggtattatgttgcgccaacgctggtggtaaatcccgatgctaaattgcgcttaactcgtgaagaggtgtttggtccggtggtaaacctggtgcgagtagcggatggagaagaggcgttacaactggcaaacgacacggaatatggcttaactgccagtgtctggacgcaaaatctctcccaggctctggaatatagcgatcgcttacaggcagggacggtgtgggtaaacagccataccttaattgacgctaacttaccgtttggtgggatgaagcagtcaggaacgggccgtgattttggccccgactggctggacggttggtgtgaaactaagtcggtgtgtgtacggtattaatctggttcgctcataagtaaaaaacggcacctggtgccgtttttttgtctgaaacaatcacttatctttcttcagcgcccctagcgttggcgtttcgtcaaagaagttccatggtttcagcagagtatgtacccattcggtcggcataatcggccactcttcggcgcgggccacatgtgtggtgccggtggtcatccagacaacggcgtcggtgttgtccagcgactcgttatccttactgtattgtccaagaccggtgtcatgagtagaacggttcggatatttgccttccgggaaacgctcgccaggatgataacgcgttacccagagctgcttgtccataaagcttaaacgatgatagatccactcgtccggcgcgaactgggcaccttttgctaccgggtgagtaccacctgcataaggaataatttgataggaaaccggattgcccatgcggttctctttgttcgggttactcaacagacgaatcgtgcccggatcaaatttctgtgcggcatcctgttcattgccgatgttgtactgattaacttgcatggtactggtgcgtgggccaccggcagtattcggttttaccactgggtccatcgccaccaggctgttattctcgccatctacatccagatcgaggcggaaattataaatatgttggtgtgtagtacccacgatattgtgatcgataagcgtgccgtagcgcgtgtcatctttcgccgtctcatcgtgcatggttttcgctttaacacctttcaccgcttcgatgcccgtagcaccggcatcgatgccaatagtgccgttttcatggaagatccagtcaaaaatgtagtcatagttacccactgtactgatccagcgcaccactaactcccggcgttcggtactgacgttgggctggcccatttcctgatgcttatactccggcccggcataacgttcaaataccgcgatagcgcgagggatctccatcggcacgccagtgtagtcggcgatggtttcattaaggagcactgcgttagacggggcatctttaccacgagcaattggtgaggttagcgtgcccataccgtagtcaccagagtccagatacgctttaaagtaccagccaatatcaggatcaccgtaaggcacaatcatgccgccgagagaaccttcgtacatgactttgcgtttggtgccattgtcgttataagtcacggtggagatcatcggcccgacgcgagagttcatgctgaggtgaaaatcccagttccgccagtgaatcatatcgccagtaatggtgtaatttttaccttcaggctcaatgatttgcataggcttaactgccggagcaacgcggtcacggccatcaaatgggcgtgcggtcattggcaccggaactaccggaccttcttcaatcttaacgatttttttctgttctaaatcaacgaccgccaccaggttttcgatgggatgtgcccagtagttgccatcaccgacatcaagatagctgatgactttgagcaaccgggcatcttgtttcaggccatctttaccatcgaaataacctacggtcagcggcgtggtaatcacttttttcgcatcagtaataccgcgtttcttcacggcagcggcaaattcttcactgttgttaataatgttctgcacactggcgaaatcatccagcaacaccataccgtgggcgtctttaatgggttgccaggagagcagtttgttgttttgcagatccaccaccgcttcgatgatatgtttgccgtcgagcataatgacgtcggctttgcgcggctggtcaaccggtttgttttccagcgcaaacgcccagacagcttctttatctggcggtagcagggagatctcagtaaaacgggtattgggtttgaagtccgcggaagctttaacaatttcaacggcctgtttaatttcgtccgcagttagcgcattaagtgggtgagggcgcttttctacctgaaaggtttgatccagcccggactggaaaacatcgttaataaaggtgtcagaaacccaggctttattgtctttcatcactaccggtacttgcagtgccagaggctgaccattaacaattgctgtttgcgcaccaggcttcactttcacgtacgcgccatctttaatcagggtaaagagctgggcgtagtcgtcccactgcacatcggcaccaaattctttaagcgttttatccattggcaccatatgcgcttcaccaccgtgggcaaataccggcgcttgccaggcgaaacttaaggcgactgccaacgccagggttgttttacgggcagaatacagagaggggcttcccattattaacctcgtcagatgttgtgttcttgttagcaaccgcgctctgtgggcggtttagtcaggttcacattatcagtactgatgcaaaggggattgcctgcacctgccaggttgtttggcaggtgtgccagcttttcatacagtggatgccctgaaaatagatgtacacatcatgcataatgtgacaacgtcacaaaacttagtgaaataaaagggcaactattcgccgttgcccttcattcaccgattaatcgacaaaatcaccgtgctgcctggccaccagcgtcagaattgaatacagcgccaccggggtttgatgctgattgaatacctctacagcccattccaccacacctgttggtttttcttctgcgctacgctgttttttcagcgtcttgcgcttacaggtgagacgcacctggatggtatcgcctggctttacgggttcgataaaacgcaagctttccagcccgtagttagcaatgaccggaccgacaccggcatcgacaaacagacccgcagccgcagaaagcacaaaatacccatgcaccacccgctcaccgaaaatagattcggcagcagcaatcttatccatatgtgcatagaaatgatcgccgctgaggcaagcaaagttaacaatatcggcctctgtcattgtgcggcggggagtcaacaggctgtcgcctggttgtagctcctcaaaatatttgcggaacggatgaatacgatcttcttcgactttcgcaccgcgcacccactgtttactgatagcggcaagcatcgtcggactaccctgaacagcggttcgctgcatgtaatgtttcaccgctcgtaaaccgcctaattcttcaccgcctcctgcgcgaccaggcccaccatgtaccagttgtggcagtggggagccatgcccggtggattcttttgccgactcttcattgaggatctgaattcgcccatgcgtacgtgccgcgtcggcaataaactgacgcgcaatttgcggatcagccgtcaccagcgttcccgcaaggctaccgccgcctgcacaagccagttgcagagcatgtcgctggttttgtgctggcatcagcgttgcgacagggccaaaggcttctgttgcatgtaccgccggtgtttcatccggctgcggacagtacaataaggttggcgggaagaaggcacccgcagcagataaatccgcctgaccaccgaggcgaatctcgcatcctgcagccagcaatatgttcactttttcctgcacatcggcacgctgctcagcatttaccagtgcgcccattttcacgccttcctgagcaggatcaccgaccacgactttctgtaatcgcgcaaccagagcatcactgacagcattaaccaatgcctgcggcacaataatccgccggattgccgtacatttttgcccggcttttgtggtcatctcacgcacaacttcacgaataaacagcgcaaactccggttgatccggggtgacatcttcgcccagtacgcagcagttcagggaatcagcttccatagtgaaggggatagatttggcgacgatatttggctgaactcgcagcatctgtccggtcgccgctgaccccgtgaaagtcaccacatcctggctgtccagatgatccaacaagtcgccagcactaccgcagatcagactaattgcgccttcgggaacaagaccactatcgacaattgatttcaccatcgcctgagtcagttgggccgtcgcggtagctggtttgatgatggctggcattccgcccagccacgttggtgccagcttttccagcattccccagcaggggaagttaaaggcgttaatatgcactgccacgcctgactttgaggtcagtaaatggcgcgcggcaaatccaccttctttcgataaggggatcaattcatcttccggccacagcgtatcgtcaggcagctcccggctaccgaggctggcgtaagtaaataacgtcccaatgccaccttcaatatcaacccaactgtctgcccgcgttgcgcctgtttgcgcagaaagagcatagaaacgctctttttcactcagcagatgtttagcgaccgctttaagcatcgccgcacgttcgataaaggtcatagcgcgaagggcgggggcacctttttcaatggcaaactggcgggcagccgccatatcaagaccttcactggtcacttcccataacgcctcgccgctaatagcgtggtgaatcaaacggctacggccccggccagactgccaggtaccggataagaaactggctaactgctgcatcgctactctccagatgtttcacatttctgttgctaatagttaaatcgcgaatcataaaaagcaaaggatcttttaacgaaatgttaactatgcgatctgtatagcaactgcggaaaacattaatgcactgataaataatgatttataaaaatagggtgcgaaatccgtcacagttcaaacatacaaaatttgtgattttacttaactattgtgtaactttcataaaacaatgtgattcgtgtttttaattaattcacgaaaactggaatcgtaaaggtgatgacgtgacccaagaagaacgctttgagcaacggatagcccaggaaacggctatcgagccacaggactggatgcccgatgcttaccgaaagacattgatccgccagattgggcagcatgcgcactccgagattgttggtatgttgcctgaaggtaactggatcactcgcgcaccaaccttgcggcgtaaagccattctgttggccaaagtgcaggatgaagccggtcatggtctgtatctctatagcgccgccgaaacactgggctgcgccagagaagacatctaccaaaaaatgctcgacggacggatgaaatattcctccatctttaattatccgacattgagttgggctgatatcggtgttatcggctggctggtggatggcgcagcgatcgtcaatcaggtggcgttatgccgcacttcttatggcccgtatgccagagcaatggtgaaaatctgcaaagaagagagttttcaccagcgtcaggggtttgaagcctgcatggcactggcgcagggcagcgaagctcaaaagcagatgttgcaagacgccattaaccgtttctggtggccagccttaatgatgttcgggccaaacgatgataactcgccaaacagcgccagaagtctcacctggaaaatcaaacgtttcaccaacgacgaactccgccagcgtttcgtggataacaccgttccacaggttgaaatgctcggtatgaccgttcctgacccggatctgcattttgacactgaaagcggtcactaccgctttggtgagatcgactggcaggagtttaacgaagtaattaacggtcgcggaatttgtaatcaggagaggctcgacgccaaacgtaaagcctgggaagaaggtacctgggtacgggaagcagcgctggcccatgcacaaaaacaacatgcccgtaaggtcgcataaggagattcaaaatgagtaatgtttactggccgttatacgaagttttcgtgcgtggcaaacagggcttatcacaccgccatgttggcagtttacatgctgccgatgagcggatggcactggaaaatgcccgtgatgcttacacccgtcgtagcgaaggatgttcaatttgggtggtgaaggcgagtgaaattgttgcctcgcaaccggaagaacgcggtgaattttttgatccggctgaaagcaaggtctatcgccatccaacgttttacaccatccctgatggcattgagcacatgtgaggtcggaaatgaatcagttaacggcttacaccttgcgcctgggcgataactgcctggtgctctcccagcggttgggtgaatggtgcggtcacgcaccggaactggaaatcgatctcgcactggcaaacattggcctcgatttattaggtcaggcacgcaacttcttatcgtatgccgctgaattagcgggagaaggcgatgaagataccctggccttcacccgagacgagcgccagttcagcaacttattgttggttgaacaaccaaacggcaattttgccgacaccattgcacgccagtatttcatcgatgcatggcatgtggcgctctttacccgtctgatggaaagccgtgatccgcaactggcggcgatttctgccaaagcaattaaagaagcgcgctatcacctgcgttttagtcgtggctggctggagcgactgggcaatggtactgacgtatcagggcaaaagatgcagcaggccatcaacaagttgtggcgttttaccgccgaactgttcgatgccgacgagattgatattgcactgagtgaagagggtattgcggttgatccacgcactttacgcgcagcgtgggaagccgaagtttttgccgggatcaacgaagccacattgaacgtaccgcaagagcaggcgtatcgcactggcggtaaaaaaggactgcataccgaacaccttggacccatgctggcagaaatgcagtatctccagcgtgtcttgcccggtcagcaatggtaacagaggagatgggtatgcaacgtctggccaccattgcaccgccacaggttcatgagatatgggcgctactcagccagatcccggacccggagatcccggtgctgaccattactgatttaggcatggtgcgtaatgtgacacagatgggagaaggatgggtgatcggctttacgccgacatattccggttgtccggcaacggaacatttgattggcgcgatacgtgaggcaatgacaaccaacgggtttacccccgttcaggttgtgctgcaactcgacccggcatggaccaccgactggatgacccccgatgcccgtgagcgtctgcgagagtatggcattagcccgcccgccggacacagttgccatgcccatttgccgccagaagtacgttgcccgcgctgcgccagcgtccataccacacttatcagtgaatttggttccacggcctgcaaagcattgtaccgctgcgatagttgccgcgaacctttcgattatttcaaatgtatttgaggatgccatgacaacgtttcattccttaacagtggcaaaagtcgagtcggaaacccgtgatgcggtgaccattacctttgcggtgccccagcctttgcaggaggcgtatcgctttcgccccggtcaacatttgaccttaaaagccagctttgatggtgaagaattacgccgttgttactccatttgccgcagctatctgcctggcgaaattagtgtggcggtgaaagccattgaaggcggacgtttctcccgctatgcccgcgaacacatccgccagggtatgacgctggaggtcatggtgccgcaggggcatttcggctatcagccgcaggccgaacgccaggggcgctatctggcaattgcagcaggatcaggtattacgccaatgctggcgattatcgccaccactttacaaaccgagcctgaaagtcagttcaccctgatctacggtaaccgtaccagccagagcatgatgtttcgccaggcactggcagacctgaaagacaaatatcctcagcgtttacagttgttgtgcattttcagtcaggaaaccctcgacagcgatctgcttcacgggcgtattgacggtgaaaaattacagtcacttggggcctcgctcattaattttcgtctttatgatgaggcatttatttgtggtccggcggcgatgatggatgacgcggaaaccgccttaaaagcactgggaatgccagataaaaccattcatctggagcggtttaatacgcctggcacgcgcgtcaaacgtagcgttaacgtgcaaagtgacggacaaaaagtgactgtacgtcaggatgggcgggatcgggaaatcgtgcttaatgccgacgatgaaagcattctcgatgcggcattgcgccagggggcggatctgccctatgcctgcaaaggcggcgtctgtgcgacctgcaaatgcaaagtgctgcgtggcaaagtggcgatggaaaccaattacagtctggaaccggatgaactggccgcaggttatgtgttgagttgccaggcactgccgctgaccagcgatgtggtggttgactttgacgcgaaggggatggcatgagcgaactgatcgtcagccgtcagcaacgagtattgttgctgacccttaaccgtcccgccgcacgtaatgcgctaaataatgccctgctgatgcaactggtaaatgaactggaagctgcggctaccgataccagcatttcggtctgtgtgattaccggtaatgcacgcttttttgccgctggggccgatctcaacgaaatggcagaaaaagatctcgcggccaccttaaacgatacacgtccgcagctatgggcgcgattgcaggcctttaataaaccacttatcgcagccgtcaatggttacgcgcttggggcgggttgcgaactggcattgttgtgcgatgtggtggttgccggagagaacgcgcgttttgggttgccggaaatcactctcggcatcatgcctggcgcaggcggaacgcaacgtttaatccgtagtgtcggtaaatcgttagccagcaaaatggtgctgagcggagaaagtatcaccgctcagcaagcacagcaggccgggctggttagcgacgtcttccccagcgatttaaccctcgaatacgccttacagctggcatcgaaaatggcacgtcactcgccgctggccttacaagcggcaaagcaagcgctgcgccagtcgcaggaagtggctttgcaagccggacttgcccaggagcgacagttattcaccttgctggcggcaacagaagatcgtcatgaaggcatctccgctttcttacaaaaacgcacgcccgactttaaaggacgctaatgatggaattcatcctcagtcatgtagaaaagggcgtgatgacactaacgctcaaccgcccggaacgcctgaacagttttaatgatgagatgcacgcacaactggcagagtgcctgaaacaggtcgagcgcgacgacactatccgttgcctgttacttacaggtgccgggcgcggattttgtgctggtcaggatcttaacgatcgtaacgttgatcccacaggccccgcaccggatttagggatgtcagttgaacgtttctataacccactggtacgtcgcctggcaaaactgccaaaaccggtgatctgtgcagtcaatggcgtggcggcaggggcaggcgcaacactggcactggggggcgacatcgttattgctgcccgttcagcaaaattcgtcatggcgtttagtaagttaggcttaatacccgattgcggtggaacctggttactgccacgcgttgccggacgagcgcgcgccatggggctggcactgctggggaatcaactgagtgctgaacaggcgcacgaatgggggatgatctggcaggttgttgatgatgaaacgctggcagataccgcgcaacagctggcacggcatctggcgacacaaccgacatttggtcttggacttatcaagcaagcgataaatagcgctgaaaccaatacgctcgatacgcaactggatctggaacgtgactatcagcgacttgccggacggagcgcagattatcgtgaaggtgtcagtgcgttcctggctaaacgctcaccgcagttcacggggaaatagcatgatgataaatgtgcaaactgtggcagtgattgggagcggcaccatgggggcaggcattgctgaagttgctgccagtcatggacaccaggttttactgtatgacatttctgctgaagcgctgacccgcgcaatcgacgggatacacgcgcggctaaattcacgcgtgacgcggggaaaactgactgctgaaacctgtgaacgcacattgaaacgcctgatcccggtgaccgatattcacgcgctggcagctgcggacctggtcattgaagcggcgtctgaacgtctggaagtcaaaaaagcgctctttgcacagctggcggaagtttgcccgccacaaacgctattgaccactaacacttcgtcaatctctataaccgcgattgctgcggagataaaaaatcctgaacgtgttgcggggctgcatttttttaacccggcaccggtgatgaagttggtggaggtggtcagtgggctggcaacggcggcggaagttgttgagcagttgtgtgaactaacgttgagttggggtaagcagcctgtgcgctgtcattcgactcctggatttatcgttaaccgtgttgcgcgtccttattattccgaggcctggcgggcactggaagagcaggttgctgcaccagaagtgattgacgctgcacttcgcgatggcgctggtttcccgatggggccgctggaattaaccgatctgattggtcaggacgtcaattttgctgtcacctgttcggtgtttaacgctttctggcaggagcgtcgttttttaccttcgctggtgcaacaggaactggtgattggtggacggttgggcaagaaaagtgggctgggcgtgtacgactggcgcgcggaacgtgaggcagttgttggcctggaagcggtaagcgacagttttagcccaatgaaagtagaaaagaaaagtgacggtgtcacggaaattgacgatgttttattgattgagacacaaggcgagacggcacaggcgctggcaatacgactggcacgcccggtggtagtgatcgataaaatggcgggcaaggtggtgaccattgctgctgcagcggtgaacccggactcagcgacccgcaaggccatttattacctgcaacagcagggcaaaacagtgctgcaaattgcagattacccaggaatgctgatttggcgaacggtagcaatgatcatcaatgaagcccttgatgcgcttcaaaaaggcgtggcctctgaacaggatatcgataccgccatgcgtcttggggtgaattatccatatggcccacttgcctggggagcgcaacttggctggcagcgaatattaaggctccttgaaaatctacagcatcactatggcgaagaacgctatcgcccatgttcattgctgcgccaacgggcgcttctggagagcggttatgagtcataaggcctggcaaaatgcccatgcaatgtatgagaacgatgcctgcgccaaagcgcttggcatcgacattatctcaatggatgaaggctttgctgtagtgaccatgaccgtcactgcacaaatgcttaacggtcatcaaagttgccacggcgggcagctattttcactggctgatactgcctttgcctacgcctgcaatagccaggggctggcagccgtcgcttctgcctgcacgattgattttttgcgtccaggctttgccggagacaccttaactgctactgcgcaggtacgtcatcagggcaagcaaaccggtgtttacgacatcgaaattgttaaccaacaacaaaaaacggttgcgctgtttcgcggtaaatctcaccgcatcggcggcaccattacaggagaagcctgatgcgtgaagcctttatttgtgacggaattcgtacgccaattggtcgctacggcggggcattatcaagtgttcgggctgatgatctggctgctatccctttgcgggaactgctggtgcgaaacccgcgtctcgatgcggagtgtatcgatgatgtgatcctcggctgtgctaatcaggcgggagaagataaccgtaacgtagcccggatggcgactttactggcggggctgccgcagagtgtttccggcacaaccattaaccgcttgtgtggttccgggctggacgcactggggtttgccgcacgggcgattaaagcgggcgatggcgatttgctgatcgccggtggcgtggagtcaatgtcacgggcaccgtttgttatgggcaaggcagccagtgcattttctcgtcaggctgagatgttcgataccactattggctggcgatttgtgaacccgctcatggctcagcaatttggaactgacagcatgccggaaacggcagagaatgtagctgaactgttaaaaatctcacgagaagatcaagatagttttgcgctacgcagtcagcaacgtacggcaaaagcgcaatcctcaggcattctggctgaggagattgttccggttgtgttgaaaaacaagaaaggtgttgtaacagaaatacaacatgatgagcatctgcgcccggaaacgacgctggaacagttacgtgggttaaaagcaccatttcgtgccaatggggtgattaccgcaggcaatgcttccggggtgaatgacggagccgctgcgttgattattgccagtgaacagatggcagcagcgcaaggactgacaccgcgggcgcgtatcgtagccatggcaaccgccggggtggaaccgcgcctgatggggcttggtccggtgcctgcaactcgccgggtgctggaacgcgcagggctgagtattcacgatatggacgtgattgaactgaacgaagcgttcgcggcccaggcgttgggtgtactacgcgaattggggctgcctgatgatgccccacatgttaaccccaacggaggcgctatcgccttaggccatccgttgggaatgagtggtgcccgcctggcactggctgccagccatgagctgcatcggcgtaacggtcgttacgcattgtgcaccatgtgcatcggtgtcggtcagggcatcgccatgattctggagcgtgtttgagcatatcaacctgcgagtaccctacaatgataaccaatacaaagcttgacccgattgaaaccgcgtctgttgatgagttacaggcgttgcaaacacagcgtctgaaatggacgctcaaacacgcgtatgaaaatgtgccgatgtatcggcgcaaattcgacgcagcaggcgtacatcctgatgatttcagggaactttcagacctgcgtaaatttccctgtaccaccaaacaggatctgcgcgacaactatccctttgacacctttgccgtgccaatggaacaagtggtgcgcattcatgcttcttcgggaaccacaggtaaaccgacagttgtcggctatacgcaaaacgatattgataactgggccaatattgtagcgcgttctttgcgtgcggcagggggctcgcccaaagacaaaattcatgttgcctatggttacggcctgtttactggtgggctgggtgcgcactatggtgccgaacgtctgggcgctacggtgatcccgatgtctggcgggcagacggaaaaacaagcgcaactgatccgtgattttcaaccagatatgatcatggttacgccatcttattgccttaacctgattgaagagctggagcggcagttgggcggtgatgccagcggttgctcgctgcgggttggagtatttggtgctgagccgtggacacaggccatgcgtaaagagattgagcgtcgcctggggatcaccgcactggatatttatggcctgtcagaagtgatggggccgggggtggcgatggagtgtctggaaactaccgacggcccaaccatttgggaagatcatttctatcctgaaattgttaatcctcatgacggcacaccgcttgccgatggtgaacatggcgaactgttattcaccacgctgaccaaagaagcattgccggtcattcgttaccgcacgcgtgatttaacccgactgttaccaggaacggcgcggactatgcgccgcatggatcgcatcagcggacgcagcgatgacatgttgattattcgcggtgtaaatgtctttccgtcacaactggaagaagagattgtcaaattcgaacatttatcgccgcattaccaactggaggtgaaccgccgggggcatcttgattcactttctgtgaaagtggagttgaaagaaagtagcctgacattgacgcatgagcagcgttgccaggtatgccaccagctgcgccatcggattaagtcgatggtggggatctctaccgatgtgatgatcgttaactgtggcagtatcccgcgttcagaaggcaaggcgtgtcgggtgtttgatctgcgcaatattgttggtgcctgacgtatcgtctggccctggtggggtaaagcgccagggccagaagtcgatacgacctgtgctatgattcataaatcacaacaataacaacagactgaagcgaatgagtaaacttgatacttttatccaacatgctgtaaacgctgttccggtcagtggcacatctttgatctcctctctgtatggtgattcgctttcccatcgtggtggtgaaatctggttgggtagtctggctgctttgctggaagggctgggatttggtgagcgtttcgtgcgcaccgctttgtttcgtcttaataaagaaggctggctggatgtttcccgcatcgggcgacgcagtttctatagcctcagtgataaaggcttgcgcctgacgcgacgggcagaaagtaaaatttatcgcgcagagcaacctgcatgggatggtaaatggctcctgttgctctcggaaggtttagataaatcaacgctggctgatgtcaaaaagcagttgatctggcaaggttttggcgcactggcacccagcctgatggcatcgccgtcgcaaaaactggccgatgtacagacacttttgcatgaagcgggtgtggcggataacgtgatttgttttgaagcgcaaataccactggcgctttctcgcgcagcactgcgtgccagagtagaagagtgctggcatttaactgaacaaaatgccatgtacgaaacctttattcagtcattccgcccgctggtgccgcttttaaaagaggcggcagacgagttaaccccggagcgggcatttcatattcagcttttactgatccatttttatcgccgtgtcgtccttaaagacccattgttgccggaggagttgcttccggcacactgggcagggcatacggcgcgtcagctgtgtatcaacatttatcagcgcgtagcgcctgctgctttagcgttcgttagtgaaaaaggtgaaacctcggtcggtgaactgcctgcgccgggaagcctgtattttcaacgttttggcggcttgaatattgaacaggaggcgttatgccaatttatcagatagacggtctgactccggttgtgccagaagagagttttgtccatccgacagcggtattgatcggcgatgttattctcggcaagggcgtttacgttgggccaaatgccagcctgcgtggcgattttggtcgtatcgtggtgaaagatggcgcgaacattcaggataattgcgttatgcacggttttcccgagcaggatactgttgtaggagaagatggacatattggtcatagcgctatccttcacggctgcattatccgccgcaatgcattagtgggaatgaacgcggtagtgatggacggtgcggtgattggcgagaacagcattgttggtgcatccgcatttgtgaaagccaaagcagaaatgccagctaattacctgattgtcggcagcccggcgaaagcgattcgtgaactcagtgagcaggagttggcatggaaaaagcagggtacgcatgagtaccaggtgctggtgacacgctgtaagcagacgttacatcaagtcgagccattgcgggaaattgaacctggcaggaaacgcctggtatttgatgagaatctgcgaccgaaacagtaacagatgtaaaattattttgtccctttaattataaagcagagttatgtttaagctctgctttatttatttgagtattaattcataccgttttttcatcatataattatttataatgagaatgtggttttaatttgtaatttatattatatacacaatttatatatttcatggtctttttttattcacctgaattataattgtgaattataggaaagtatgtttgattagataataatctactggcaatattggatgtcttctatgttttaaataactaattggtcgggttagtgcatccggctttctttatattcgccagaaggatttattatgcaaaggaaaactctattgtcggcctgtattgcattagctctgagtggtcagggttgggcggcagatatcacagaggtagaaaccaccacaggtgaaaagaaaaataccaatgtgacttgtccggcagacccaggaaaactcagtccggaagagcttaaacgcttaccctctgaatgctctcctttagtcgaacaaaacctgatgccatggctttccacaggcgctgctgcgttaatcacggccttagccgtagtggaactaaacgacgatgatgatcatcatcatcgcaacaattctccactcccaccgacaccccctgatgatgaatcagacgacactccagttcccccaactcctggcggagatgagataataccggacgatccggatgatacgcctacacctcccaaaccggtttcgtttaataatgacgttattctcgataaaacagaaaaaacgttaactattcgcgattcagtttttacttataccgagaatgctgacgggactatatctctgcaagatagcaatggtcgtaaggcaacgattaatctttggcagattgatgaagcgaataacactgttgcccttgaaggggtgagcgcagatggcgcaacgaagtggcaatataatcacaacggtgagcttgttattacgggtgataatgccacagtaaacaacaatggcaaaaccaccgttgacggtaaagattccaccggtacggaaatcaacggtaataacgggaaagtgattcaggacggcgatctggatgtcagcggcggcggtcacggtattgatatcaccggtgacagcgcgacggtggataacaagggcaccatgaccgtcaccgatccggagtccatgggtatccagatcgacggtgacaaggccatcgtcaataacgaaggcgagagcaccatcaccaacggtggcaccggcacccagattaatggtgatgacgccacggcaaacaacaacggcaaaaccaccgttgacggcaaggattccaccggtacggaaatcaacggtaataacggaaaagttattcaggacggcgatctggatgtcagcggcggcggtcacggtattgatatcaccggcgacagcgcaacggtggataacaagggcaccatgaccgtcaccgatccggagtccatcggtatccaggttgacggcgaccaggcggttgttaacaacgaaggcgagagcgccatcaccaacggtggcaccggcacgcagattaacggtgatgacgccacggcaaacaacaacggcaaaaccaccgttgacggcaaggattccaccggtacggaaattgctggcaataacgggaaggtgattcaggacggcgatctggatgtcagcggcggcggtcacggtattgatatcaccggcgacagcgcaacggtggataacaagggcaccatgaccgtcaccgatccggagtccatcggtatccagattgacggcgaccaggccatcgtcaataacgaaggcgagagcactatcaccaatggcggcaccggcactcagatcaacggtaacgacgccaccgcgaataacagtggaaaaaccactgttgatggaaaagattccacgggtaccaaaatcgcgggcaatatcggcattgtaaatctggatggtagcctgactgttacaggcggtgcgcatggtgttgagaacattggtgacaacggcacggttaacaacaaaggagatattgttgtttccgatactggatcgattggcgtgctcatcaacggtgagggggcaacagtatccaatacgggtgatgttaacgttagcaatgaagcgacagggttcagcatcacaaccaacagtgggaaggtttcgctggcaggcagtatgcaggttggcgatttctcgaccggggtagatcttaatggcaacaataacagcgtgacgctggcggcaaaagatctaaaagtggtcgggcagaaagcgacgggcataaacgtttctggcgatgcgaatacagtgaatatcactggtaacgttctggttgataaggataaaaccgcagacaatgcggcggaatatttcttcgatccatccgtgggtatcaacgtttacggcagtgataataacgtgacgctggatggaaagttaactgttgtatcagacagtgaggttacttctcgtcagagtaatttatttgatggcagcgcagagaaaacgtcaggtctggttgtgattggcgatggcaataccgttaatatgaatggtggacttgaactgattggagagaaaaacgcgcttgcagatgggtcgcaggttacttccttgcgcacaggatatagttataccagcgttattgtcgttagtggtgagtcgtcggtatatctgaatggagatacgacaatcagcggagaattccctctggggtttgccggggttattcgggtacaggataaagctttgctggaaattggcagtggcgctacgctaacaatgcaggatattgacagttttgaacatcatgggacaagaaccctggatttgcccctatatttccagacatctgttatcacttaacccattacaagcccgctgccgcagatattcccgtggcgagcgataacccagcgcactatgcggatgccattcgttataatgctcgaacgcctctgcaaggttctttgctgccgttaacccgtctggtttgggcatgatactgatgtagtcacgctttatcgttttcacgaagctctctgctattccgttactctccggactccgcaccgccgtgttcttcggttcaagtcccaacatccgggcgaactggcgtgtttcattagcccggtagcatgaaccattatccgtcagccactccactggagacgacggaagatcgttgccgaagcggcgttccaccgctcccagcatgacgtcctgtactgtttcactgttgaagccgccggtagtgaccgcccagtgcagtgcctcacgatcacagcagtccagcgcgaacgtgacacgcagtctctctccgttatcacagcagaactcgaacccgtcagagcaccatcgctgattgctttctttcacggccactctgcctgtatgtgcccgtttcgatggcggtacagcaggttttcgctcaagcaacagcgcattctggcgcatgatccggtaaacacgtttggcattgatcgcaggcataccatcaagttctgcctgtctgcgaagcagcgcccatacccgacgataaccatacgttggcagctctccgataacatggtgtatacggagaagcacatccgtatcatcagtgtgacgactgcggcggccatccatccagtcatcggttcgtctgagaatgacgtgcaactgcgcacgcgacacccggagacaacggctgactaagcttactccccatccccgggcaataagggcgcgtgcgctatccacttttttgcccgtccatattcaacggcttctttgaggagttcattttccatcgttttcttgccgagcaggcgctggagttctttaatctgcttcatggcggcagcaagttcagaggcaggaacaacctgttctccggcggcgacagcagtaagacttccttcctggtattgcttacgccagagaaataactggctggctgctacaccatgttgccgggcaacgagggagaccgtcatccccggttcaaagctctgctgaacaattgcgatcttttcctgtgtggtacgccgtctgcgtttctccggccctaagacatcaatcatctgttctccaatgactagtctaaaaactagtattaagactatcacttatttaagtgatattggttgtctggagattcagggggccagtctaaaccccagaacttacttatgctgattccggtgcgaaaattgttaataaaggtacttgtagattcaattggtcaacgcaacagttatgtgaaaacatggggttgcggaggttttttgaatgagacgaacatttacagcagaggaaaaagcctctgtttttgaactatggaagaacggaacaggcttcagtgaaatagcgaatatcctgggttcaaaacccggaacgatcttcactatgttaagggatactggcggcataaaaccccatgagcgtaagcgggctgtagctcacctgacactgtctgagcgcgaggagatacgagctggtttgtcagccaaaatgagcattcgtgcgatagctactgcgctgaatcgcagtccttcgacgatctcacgtgaagttcagcgtaatcggggcagacgctattacaaagctgttgatgctaataaccgagccaacagaatggcgaaaaggccaaaaccgtgcttactggatcaaaatttaccattgcgaaagcttgttctggaaaagctggagatgaaatggtctccagagcaaatatcaggatggttaaggcgaacaaaaccacgtcaaaaaacgctgcgaatatcacctgagacaatttataaaacgctgtactttcgtagccgtgaagcgctacaccacctgaatatacagcatctgcgacggtcgcatagccttcgccatggcaggcgtcatacccgcaaaggcgaaagaggtacgattaacatagtgaacggaacaccaattcacgaacgttcccgaaatatcgataacagacgctctctagggcattgggagggcgatttagtctcaggtacaaaaaactctcatatagccacacttgtagaccgaaaatcacgttatacgatcatccttagactcaggggcaaagattctgtctcagtaaatcaggctcttaccgacaaattcctgagtttaccgtcagaactcagaaaatcactgacatgggacagaggaatggaactggccagacatctagaatttactgtcagcaccggcgttaaagtttacttctgcgatcctcagagtccttggcagcggggaacaaatgagaacacaaatgggctaattcggcagtactttcctaaaaagacatgtcttgcccaatatactcaacatgaactagatctggttgctgctcagctaaacaacagaccgagaaagacactgaagttcaaaacaccgaaagagataattgaaaggggtgttgcattgacagattgaatctacactgttgaaattcagaatttaggttttgcttttgttactggtgaaaatacaacaggtataaatagtggcacgatctcgttattacaaaatggtaaagatccggcaccgtctcccattgttttactggctactaacggagggagcgccactaatgcaggtacgatcacaggtaaagtgacggaacaacatagcgtatttaacaagtattcaacgggcacatcgaattcatttatttttaataacgatgtcagtagcataacagggttagtcgctcaatcgaatagcacaattatcaatactgacagcggcatcattgatttgtatggtcgtggtagtgtcggcatgcttgctatagcagattcaacagcagaaaatcagggtaaaattacactggattctatgtgggtagatgcaaatgacactaccgcaatgcgagatatagctagcaacagcgccattgacttcggtacaggtgtgggagttggtactgatagttatagtggtgcagggaaaaatgcaacagcaattaaccaattgggcggtgttataactatttataacgccggcgcaggtatggcggcctatggcgccagcaatacagttattaaccaggggacgattaacctcgaaaaaaatggtaattatgacgatagtctggcagcaaatactctggtagggatggctgtttatgagcatggtactgctatcaacgaccagacgggtgttatcaatatcaatgttggtactggtcaggcgttttataacgatggcacaggaacaattgttaactatggtacaatctgcactttcggcgtgtgccaatcggggaatgagtacaataatacagatgatttcacctcactgatctataccggtggcgatacgattacacgaagcggagaaactgtaacgctaaataaatctgctgctgtgactgataagctggctgggaatgttgttaatagcggaacgctttccggtgatcaaattacggtatcaagcggtcttctggaaaataccagcggtggcatcatcaataacttagtaaaacttgacaagggtgccgtcattaaaaatgccggggtgatgacgaataacgtcgatgttagcggtggaatcctcaataatgccggagaaatgactgcgcaaattaccatgaatgctggtgctgatagttcgttagtgaacaacaccggaaccatcaataaaatcgtgcagaacgcgggggtattcaataatagtggcagtgtaacagggcggatgatgtcggctggcggggtctttaataatcaaactgacggggcgattatgagaggtgctgcgctgacaggtactgcagtggcaaataacgaaggaacctggaacctcggaagtagtagtgagggtaacaacaccgggatgctggaagttaataataattcagctttcaataaccgcggcgagtttattcttgataacgacaagaatgctgtgcacatcaaccagtccggtacgctttataataccggtcacatgaacatcagtaattcttcccacaacggagccgttaatatgtggggcggaaatggtcgttttatcaatgacggaacgattgatgtttctgcgaagtcactggtagtcagcgctaataatgccggcgatcagaatgccttcttctggaaccaggataacggggtcatcaacttcgatcacgacagcgccagtgccgtgaaagtcacccacagcaactttattgcccagaatgacggcatcatgaacatcagcggcaccggtgctgtggctatggaaggtgataagaacgcgcagctggttaacaatggcaccatcaacctcggtaccgcaggcactactgacacgggtatgatcggtatgcaactcgatgccaacgccacggcggatgcggtaatcgaaaacaacggcaccatcaatatcttcgccaatgactcgtttgcatttagcgtactgggtacagtaggtcatgtggttaacaacggcacggtggtgattgccgatggggttacgggttctggactgatcaagcagggcgacagcatcaatgttgaaggtatgaacggtaacaacggtaatagcagcgaagtgcattatggcgactatacgttgccggatgtgccgaagcccaatacggttagtgtaacgtcgggaagtgatgaggctggtggcagcatgaacaacctcaacggctatgtcgtcggtaccaacgttaacggcagcgccgggaagctgaaggttaacaatgccagcatgaacggcgtggagattaacacgggctttaccgctggtacggcagacaccactgtgagttttgataacgtagtggaaggtagcaacctgaccgacgctgacgccatcacctcaacgtccgtggtatggactgccaaaggcagcaccgatgccagcggtaacgttgacgtcaccatgagcaaaaatgcctacaccgatgtggcaacagatgcctcggtgaatgacatcgcgaaagcactggatgcgggttacaccaacaacgaactgtttaccagcctgaacgtcggcacgactgctgaactgaacagtgctctgaaacaggtcagcggtagccaggcgaccacggtattccgcgaagcgcgcgtgttaagcaaccgctttagtatgctggcagatgccgcgccgaaagtgggtaacggtctggcgttcaacgttgtcgcgaaaggcgatccgcgtgccgagttaggtaataataccgaatacgacatgctggcattgcgtaaaactatcgacctgagcgaaagccagacgatgagtctggagtacggtatcgctcgtctcgatggtgatggtgcgcagaaagcgggtgataatggcgttacaggcggttatagccagttttttggcctgaaacatcagatgtcgttcgataacggcatgaactggaataacgccttgcgttacgacgttcacaaccttgacagcagccgctcgattgcatttggcaacacgaacaaaacggctgataccgacgtgaaacagcagtacctggagttccgcagcgaaggggcgaagactttcgaaccgagcgaaggactgaaggttacgccatatgcgggtgtaaaactgcgtcacacactggaaggtggctatcaggagcgcaatgccggagactttaacctgaatatgaacagtggcagcgaaacggcggtggacagcatcgtcgggctgaaactggactacgcaggtaaagacggctggagcgctagcgctacgctggaaggcgggccgaacctgagctacgcgaagagccagcgtacggcaagcctggcaggcgcaggcagtcagcactttaacgtcgatgacggtcagaagggcggcggcatcaatagcctgacaagcgtcggcgtgaagtacagcagcaaagaaagttcgctgaatctggatgcgtacaactggaaagaggatggcatcagcgataaaggcgtgatgctgaacttcaagaaaacgttctaatttttagcatgtgatccctaaaccgcaacgctgatacaggttgcggtttttttattgccggatgtggtacgtgacgcgttttgttttgtgtctttcaggacaatagagcaactcatccagtaatcttgtttacaccttcgcattatttatctcttttcgtttctatactgatttttcttaatccgttttattacagggcagggtgcgatgagcagcaatacatttactctcggtacaaaatccgttaaccgtcttggttatggcgcgatgcaactggcaggtcctggagtttttggccccccacgagatcgccacgtcgctataaccgtgctgcgtgaggcgctggcattgggcgtcaatcatattgataccagcgacttttatggtccgcacgtcaccaatcagattatccgcgaagcgctttatccttactctgacgacctgacaattgtcactaaaattggtgcgcggcgtggagaggacgcatcctggttgcccgcattttctccggcagagctgcaaaaagcggtgcacgataatctacgtaatctcgggctggacgtgctggatgtggttaacctgcgcgttatgatgggggatggtcatggcccagcggaaggatcgattgaggccagcctgaccgtgctggcagagatgcaacaacaaggcctggtaaaacatattggcctgagcaacgtcacaccgacgcaggttgcagaggcgcgcaagattgccgaaattgtctgtgtgcaaaacgaatacaacatcgcgcaccgtgctgatgatgcaatgattgatgctttggcccacgatggcattgcctacgtgccgttcttcccgctcgggggctttacaccgctgcaatcgtccacactttccgatgttgctgcgagcctgggtgcaacaccaatgcaggtggcgctggcgtggctgttacagcgttcaccgaatattttgctgatcccagggacgtcttcggttgcgcatttacgggagaatatggctgctgaaaaattgcatctttctgaggaagtgttgtctacgttggatggtatttcgcgagaataacgaatatacaaaagggaaagatgcatttccctttttttcttttttaatggcatggagtgcatatgttgaaggccaggaattgcggctggatacgtttactgcccctgtttatgctgagtctaccagtacaggcggaacttcgatgtgttgcaaatgcagttgatattgaatcatttttttctgcggctaccgctgaagataaacaacaagttgaacaagctatcaacagtagcgtgaatcttgtccccttcggtttatctgcatcgaactggaaagtgcatcgtggcgatttagtggtagaaggtaatatagagagtaatcaaaaattgattgttcttgggaatttgacagtcaaaggtaatatttccactttctctctttctaatccatgggttattctcggtaacgtgacggcaacgaatatagttgcggattcaccactgttaattaccggttcgataaatgcaagtggactggtatttatcgactcatattacgataatccgtctacgattaaggggagtattaatgcgcgtgggatatttatcaatgacataattgcacctgttgttgcgtcttcgacaaatagtgaattcatggtccgtgcgagtgacaaacatgacactgaaaatgtcaaaaaagcgctgatgataataaatcctgatgcatattattgggggctaattaatgatgaagatgctctgaaagaaatttttaagcgaagcaatattcgcatggcagggaatgtctgtaatcagatgaaaaaagaagcgctgtttcgccctaagccttctcctgagttagtgcaagaattgcaaatgctggatgaaggcaaagttgctgcatttgaaggacgagacattgcgacatttgatcttgccgtaatgcgaactctcccaaggcttaaaggaatttcagctaacctacgcaaacaacttattaatagcaatgatgaacaaacgattgaaagtatggcgagatatatgcctgacaatgagattctggagttgaccgatcagcaattgggttaccagcctgttgttctggggttgctcgaccgtgaaccgctctctgtcgaaataatgacgcgaatgagtcgtctacctgatggtgtcggtccgttgaatcttgcgctacgtgaaaatctccctctggatatcgtcatgactctggcgaaaagagattgggatatgatcattcaggagctttataaagatgcgtggttattgcctgaatccattattgatggctatatccgcagtgatgattcctctattcgtcaggtcggtgctggaggacaactcacctacaatcaggcaatgcagttggcgaacgattcatcaaacaatgttgtcacaagcttagcgttcaagctggcagagatgaaacaccatggtcaattgttgcggatgacgccacaagagagtgacaaagttgcaggctatttataccaaaaattcgagaatgacgatgatctaatacgtgtgttatttttagcattgccagataacttacagtttaattttgttaaaaggatggagaaaaaatccccggcctacttttgctgtcgggatatgcaggtaattcactctgacgctgctttacaacggttattgacacgtttcaacgatcctgaagggtggagtaatctggcgaaaaatcagtatctgagcacgtcgatgaaacaaaaaatttggcaacgtgctttatcgcatcggaaaaataatccgaaagcagattcagatgcatatgaaaccagcgctgatatgattttgtctgagctgattagccacggcgaagttgatgaccagatgctattaaatgccaccgccctgatacgttcggacgactgggactttttagagagtgcattaattagttgggataatttacccgctgttgttctcaaggaattacagcaaaacacgccacgcaatgatatttgggcgaagttttttctgaggcaggaaaacagttcccgtgcgcaggttgacgaagcgttacgtgtttattatgcactagaccccgatgcgttagcacaactggatgtactggcaaaacaaccggatcgtatatggtggagtacactggcgaaaagcaatctcacatttttcaagttcggcgcacttaacaaccgccacacaccgcctgcagtactggcggcagaaattgatcccgagtggtggattgtggcgatgaataatccccgttttccagttgatgtattaaaggcgaggctgaaacgtgatcctttgctggcgttagagcttgttaaccctgaactggatttagtccgccagctggcgcttaacggtaagacgcgcgcaatacgggaacaagcgatgagaaaacttgatgagttgtattgatccacaacgtaatgttttttaactatctgattaattggggataatcattcctgacagtgagtccccaataccttgatatattctgaatttttaatgaaacggcgtgttgcgatatctccgtcaggggaattgatgcaccatagcgcaaaccgaattatcaaggattgataatgacgctctaccagataaaaccgctctttcagtcgctgttaaggccgacgatgttttggctttataagcaccacgttacagcgaatcacatcactcttgctgcactggcgctttctcttcttaccggattgctgttgatgttggcggcacaacccatcctctttttgctattgcccatcgtgctttttatccgtatggcgctcaatgcgctggatggcatgttggcgcgtgagtgcaaccagcaaacacgtctgggggcgattttgaatgagactggcgatgttatttccgatattgcgctctatttaccatttttatttttaccggaaagtaacgcatcactcgtgatactcatgttattttgcaccatattgaccgagttttgcggtttactcgcgcagacgattaacggtgttcgcagttatgccggtccatttggcaaaagcgatcgcgcgttaatatttggtctgtggggtctggccgttgccatttatccacagtggatgcagtggaataatcttttatggagcattgcttcaattctgcttctctggactgcgattaatcgttgtcggagtgtgcttcttatgagcgctgaaatataatgctggaaaaatctctggcaacacttttcgcgttgttaattttagcaacgctgataaaccgttttctgctatggcggttaccggagagaaaagggggtgaggttacattacgtattcgtacctggtggggcatcgtcatttgtttttcaatggtgatttcaggtccacgctggatgacgttgacgttttttgcgctgataagttttctggcattgaaagaatattgtacgcttatatctgtacattttccgcgttggttatattggggtattcctcttaactatttgcttatcggttttaattgctttgagctgtttctgttatttatacctttggctgggtttctgatattagccaccgggcaagttttagtgggtgacccctctggttttctgcataccgtgagcgccattttttggggctggataatgaccgttttcgccttgagtcatgccgcctggttattaatgttgccaaccacaaatatccagggcggggcgttactggtgttatttcttttggcattaaccgagtcaaacgatattgcacagtatttatggggaaaatcctgcggcagaagaaaagtggtccctaaagtcagcccgggaaaaacattggaaggtctgatgggcggcgtcatcaccatcatgattgcgtcactgattatcggaccgttactgacaccgctaaatacattacaggcattattagcgggtttgttaattggtattagtggtttttgcggcgatgtcgtgatgtcagccatcaaacgagatattggtgttaaagatagcggaaaactattgccaggacatggcggactccttgacaggattgactcattaattttcaccgctccggtatttttttattttatacgctactgctgttactgaaggaaaatagagaaaatggaaaattcacgcatccctggggaacatttttttaccaccagtgataatacagcgttgttttatcggcactggcccgctttacagcccggggcgaaaaaggtcatcgtcttatttcatcgcgggcatgaacattctggtcgtctacaacatctcgttgatgaactggcgatgccagatactgctttttatgcctgggatgcccgagggcatggaaaaagttcggggccgcgtggttatagcccatctcttgcgcgttcagtgcgggatgtcgatgaatttgtccgttttgctgccagcgacagccaggttggactggaagaggtggtagtgatcgcgcaaagcgtcggcgcagtgctggttgccacatggattcatgattatgcacctgcaattcgcgggctggtgctggcttctccggcctttaaggttaaattgtatgtgccgctggcacgtcctgcgctggcgttatggcatcgtctgcgtggtctgttttttattaattcctatgtgaaaggacgctatttgacccacgatcggcaacggggggcgagtttcaataatgatccgctgatcacacgggcgattgccgttaatatcttgctcgatctctacaaaacgtctgaacgtattattagagatgcggcggcgattacgctccccacgcaacttctgatatcaggcgatgactatgtggtgcatcgccaaccgcagattgatttttatcagagattacgtagccctctgaaagagctgcatctgctgccaggcttttatcacgacacgttgggtgaagagaacagggcgctggcatttgaaaaaatgcaaagctttattagtcgtttatatgctaacaaatcgcaaaaatttgattatcagcatgaagactgcacaggaccatcagcggatcgatggcggctactttctggtggacccgtgccattatcgccggttgatttagcgtatcgctttatgcgaaaggcgatgaaattgttcgggacgcactcttcgggcctgcatctcggaatgagcaccggctttgattcaggcagttcgctggattatgtctatcaaaatcaaccgcaaggtagtaacgcattcgggcgtttagtcgacaaaatctacctgaacagtgttggctggcgcggtattcgccagcgcaaaacccatttacaaatactgattaaacaagccgttgccgatctccacgccaaaggtttagccgtccgcgtggttgacattgccgcagggcatgggcgctatgtactggatgcgctggcaaacgagcctgccgtaagcgatattttgttacgtgattacagcgagttaaatgttgcacaggggcaagagatgattgctcaacggggaatgtctgggcgggtgcgttttgaacagggcgatgcgtttaacccggaggaactcagcgcgttaactccgcggcctacgctggcgattgtctctggcctgtatgagctttttcccgaaaatgagcaggtaaaaaactcactcgcaggtcttgccaatgccatcgaaccgggcggcattctcatctacaccgggcagccgtggcaccctcaactggagatgattgccggggtgttaaccagtcataaagatggtaaaccgtgggtaatgcgcgtgcgttcgcaaggggagatggattcactcgtgcgtgatgccggatttgataaatgcacacaacggattgatgagtggggtatttttacggtttcgatggcggtgcgtcgtgataactgaacgtcggaacgtattgctacaaggcgctggctggttattgttgctggccccgtttttcttcttcacctatggatctcttaatcagttcaccgcggttcaggaccttaacagccatgatatccccagtcaggtattcggttgggaaacggcgatcccttttcttccctggactattgttccttactggagtctggatcttttatatggattttcgctgttcgtttgtagcacgacattcgaacagcgccgacttgtccaccggcttattctggcaacggtaatggcctgctgcggttttttgctctatccgctgaagtttagttttatccgtcctgaagtgagtggggtgacgggatggctattttcgcaacttgaactgtttgatctgccttataaccagtctccttcgctgcatattattctctgctggctactttggcgtcactttcgtcagcatctggctgagaggtggcgtaaagtctgcggcggatggtttttactcatcgccatttcgacgctgacgacctggcagcatcattttattgatgtcatcacagggctggcggtaggtatgttgattgactggatggtgcccgtcgaccgtcgttggaattatcagaaacctgatcaacgtcgaatcaaaatagcactgccctatgtcgtaggcgcgggctcgtgcattgtattgatggagctaatgatgatgattcagttatggtggtcagtctggttatgttggccagtattatcgctactcataattggccgtgggtacggtgggcttggcgcgataacaacagggaaagatagtcaggggaaactaccgcccgccgtttactggctgacattgccctgccgcatcgggatgtggctgtctatgcgttggttttgtcgtcgcctggagccggtgagcaaaatgactgctggtgtttatttaggggcgtttccacgacatattccggcacagaatgcggttctggacgtcacctttgaattccctcgcggacgagccacaaaagatcgactctatttttgtgtaccgatgctggatctggtggttccggaagagggggagctccgacaggccgtggcgatgctggaaacattacgcgaagagcaaggcagcgttctggtccattgtgcattgggattatcgcgcagtgcgctggtggtggcggcatggttgttatgttacggacactgtaaaaccgttaatgaagcgattagctatattcgagccagacgcccgcagattgtgctgacagacgagcacaaagcgatgctgagattatgggaaaacaggtaagtggattgagatgtggactgaatatctacagtccacatcaagaccgtgtccggttatgcagaaacaatgctgtcgatggctgcttttgcgtcagactgtgctttcgctgccatttccggaccgtatgcgatcccttcggcgaagacaaatttcacatcggtaatgccgataaagccgaggaacgtggacagatacggcgtcaccaggtccgttggtccatctttgtggatcccgccgcggctggtaataacgatggcttttttacccgttaccagaccttccggaccgttctcggtatagcggaaagtaacgcctgcgcgggcaaccaggtcaaaatagtttttcaactgagtcgagatgttgaagttatacatcggtgccgcaataacgataacgtcgtgggctttcagctcggcaatcaactcatcggaaagtgccagagcttcctgctgacgcggagtcagcggcgcatcgctcggacgcagagcgccaaccagttcgccatccagtaccggaatcggatttgcagccaggtcgcgaacggtgatttcatcagcggagtgcttttcgcgccattgttcaacaaaataatcggacaactgattagactgagagtaccctgccaggatgctggatttaagaactaataccttgctcatggtgtttccttatagatgtttgaatgggcgatgccccgttgcttgttgacactttattcacaatcctgccacagagatagcgcaataaatcgaagcctatgttcgaatttattgaacaacgcatagaaagccgcgatgtggtactctatatctatcatttaaaagaaaattaatcaggcagactactgcccactaacgttatgacagaacaacaaaaattgacctttacggccttgcagcagcggctggattcgctgatgctgcgtgacagactgcgtttttctcgccgtctgcacggcgtgaagaaggttaaaaatcctgatgcacaacaggccattttccaggagatggcgaaagagattgaccaggcggcagggaaagtcctgctgcgtgaagcggcacgaccggaaattacttatcctgacaatttaccggttagtcagaaaaaacaggacattctcgaagcgattcgtgatcaccaggtggtgatcgtcgccggggaaacgggttctggtaaaacgactcagttaccgaaaatctgtatggagctggggcgcgggattaaaggactgatcggccatacccagccgcgtcgtctggcggcaagaacagtggcgaaccgtattgcggaagagctgaaaacggagccgggcggttgcatcggttacaaagtgcgtttcagcgatcacgtaagtgataacacgatggtcaagctgatgaccgacggtatcctgctggcggagatccagcaagaccgcctgctgatgcagtacgacactatcattattgacgaagcgcacgaacgcagcctgaatatcgattttttgctcggctatttgaaagagttgctgccgcggcgtcctgacctaaaaatcattatcacttccgcgactatcgacccggaacgcttttcgcgccactttaataatgcgccgattattgaagtctccggtcggacctatccggtggaagtgcgctatcgcccgattgttgaagaagccgatgacaccgagcgcgatcagttgcaggcgatttttgacgccgtagacgaactgagtcaggaaagccatggcgacattctgatctttatgagcggcgagcgggaaatccgcgataccgccgatgcgctgaacaagctgaacttacgccataccgaaatcttgccgctttatgcgcggctttcgaacagcgaacaaaatagggtattccagtcgcacagcggacggcgcattgtgctggcgaccaacgtcgcggaaacgtcgctgaccgtaccggggattaaatacgttatcgaccccggtacagcgcgtatcagccgctacagctatcgcaccaaagtgcagcgtttgccgattgagccgatttcccaggcgtctgccaatcagcgtaaaggccgctgtggtcgtgtgtccgaagggatctgtattcgtctctattccgaagacgatttcctctcgcgcccggagtttaccgatccggagattctgcgtaccaacctggcctcggttattttgcagatgaccgcgctggggctgggcgatatcgctgcgttcccgtttgtcgaagcaccggataaacgcaatatccaggatggcgtgcgtctgctcgaagagctgggcgcgatcaccactgatgaacaggccagcgcctataaactgacgccgctcggtcgccagctctcgcagttgcctgtcgacccacgtctggcgcgtatggtgctggaagcgcaaaaacatggctgcgtgcgtgaggcgatgattatcacgtccgcgctctccattcaggatccgcgcgaacgtccgatggacaaacagcaggcatcggacgaaaaacatcgtcgcttccacgacaaagagtctgactttctcgcgtttgtgaatctgtggaattatcttggcgagcagcaaaaggcgctttcttccaacgccttccgtcgcctgtgtcgtaccgattatctcaactatctgcgcgtgcgcgaatggcaggatatctacacccagttgcgtcaggtggtgaaagaacttggcattccggttaacagcgaaccggcggagtatcgcgaaattcacattgcgttgctgaccggtttactttcccatatcggcatgaaagatgccgataaacaagaatataccggcgcacgtaacgcgcgtttctccatcttccccggttctggtttattcaaaaaaccgcctaaatgggtaatggtggcggaactggtagaaaccagccgcctgtgggggcgcattgctgcgcgtatcgacccggaatgggtggagccagttgctcagcatttgattaaacgcacctacagcgaaccgcactgggaacgggcgcagggcgcggtgatggcaacggaaaaagtcactgtttatggtttgccgattgttgccgcgcgcaaggtcaactacagccagatcgatccggcgttatgtcgtgaactctttattcgccacgcgctggtggaaggtgactggcagacgcgtcacgcattcttccgtgaaaacctgaaactacgggcggaagtagaagagctggaacacaaatcacgtcgccgcgatattctggttgatgacgaaacgttgtttgagttctacgaccagcgcatcagccacgatgtaatctccgctcgccacttcgacagctggtggaaaaaagtcagccgcgaaacgcctgatttgctcaactttgaaaaaagcatgttgatcaaagagggcgcagaaaaaatcagcaagctggattacccgaacttctggcatcagggcaatctcaagctgcgtttgagctatcagtttgagcccggcgcggatgctgacggtgtgaccgtacatattccgctgccgttacttaaccaggttgaggaaagcgggtttgaatggcagatccccggtctgcgccgcgaactggtgattgctctgattaaatcgttgccgaaaccggtacgccgtaattttgtacccgcgccaaactatgccgaagcgtttttaggccgcgtcaaaccgctggagttaccgttgctcgacagccttgagcgcgagttacggcggatgaccggcgttaccgttgaccgcgaagactggcactgggatcaggtgcccgatcacctgaaaattaccttccgcgtggtggatgacaaaaacaagaagctaaaagaagggcgctcgctacaagatctgaaagatgcgctgaaaggcaaagtgcaggaaacgctatctgcggtggcggatgacggtatcgagcagagcggcttacatatctggagttttggtcagctgccggaaagctacgaacagaagcgtggcaactacaaagtgaaggcgtggccggcgctggtggatgagcgcgacagtgtggcgatcaaactgtttgataacccgctggagcaaaagcaggcaatgtggaacggtcttcgccgtctactgctgctgaatattccatcgccaatcaaatatttacatgaaaagttaccgaacaaagccaagctgggactgtactttaacccgtatggcaaagtgctggagctgatcgacgactgtatctcctgcggtgtggataaattgatcgacgccaatggtggcccggtctggacggaagaaggctttgctgcgctgcatgaaaaagtgcgtgccgaactgaacgacacggtggtggatattgcgaagcaggtcgagcaaatccttacggcagtgttcaatatcaacaaacgtctgaaagggcgggtggatatgaccatggcgctggggctttctgacattaaagcgcagatgggcgggttggtatatcgcggttttgtcactggtaacggcttcaaacggctgggcgacacgctgcgatatttgcaggcgattgaaaaacggctggaaaaactggcggttgatccacatcgcgaccgtgcgcagatgctgaaagtcgaaaacgtccagcaggcgtggcagcaatggatcaacaaactgccgcccgcacgtcgtgaggatgaagacgtgaaagagatccgttggatgatagaagagttgcgcgttagttacttcgctcaacaacttggtacgccttatccgatttcagataagcgtattttgcaggcgatggagcagattagcggttaaccctgctatttgcctgataaagaaaaaacccggtaagcatttagcgccgggttttttattaattctaaaacggtaagggtaaaaattcaggaattcagaaaaatacaattctctgctgcaagatgaataatgtttatctacagcatttccttaaaagatatgtcaggcttgcggagtggcggttaaggacatacgatttcctcctttcagagtgctccgcttctcactattatctcacgcagtattcttaagggaacgataaggaggaaccatgaacattaccccgtttccgacgctttcgccggcaactatagatgccataaatgttatcggacagtggctggcgcaggatgatttctccggtgaggtgccgtatcaggccgattgcgtgatccttgcaggcaatgcggttatgccgactatcgatgcggcatgtaagattgcccgcgatcagcaaattcctttactgattagtggtggtatcggtcactcgacaacttttttgtatagcgccatcgcacagcatccgcactacaacactatccgcaccactggcagagcagaagcgaccatcctggcggatatcgctcatcagttctggcacattccgcatgaaaaaatctggattgaagaccagtcaacaaactgcggtgaaaacgcacgctttagcatcgcgctattgaatcaggccgtagaacgagttcatacggctatcgttgttcaggaccccaccatgcagcggcgcacgatggcgacgttccgccgtatgactggggacaatcccgatgcaccacgctggttaagttatcccggattcgttcctcagttaggaaataacgcagacagtgtaatctttattaatcagttacaaggattatggccagttgagcgttatctctcactactcactggcgagctgccgcgtttacgcgatgatagcgatggctacggtccccgcgggcgagattttatcgttcacgttgattttccggcagaagtcatccatgcatggcaaacgctgaaacatgatgcggtgctcatcgaggcgatggaaagtcgctcgttacgttaaaaattgcccgtttgtgaaccacttgtttgcaaacgggcatgactcctgacttttatttctgccttttattccttttacacttgtttttatgaagcccttcacagaattgtcctttcacgattccgtctctctgatgattgatgttaattaacaatgtattcaccgaaaacaaacatataaatcacaggagtcgcccatgtcagtacccgttcaacatcctatgtatatcgatggacagtttgttacctggcgtggagacgcatggattgatgtggtaaaccctgctacagaggctgtcatttcccgcatacccgatggtcaggccgaggatgcccgtaaggcaatcgatgcagcagaacgtgcacaaccagaatgggaagcgttgcctgctattgaacgcgccagttggttgcgcaaaatctccgccgggatccgcgaacgcgccagtgaaatcagtgcgctgattgttgaagaagggggcaagatccagcagctggctgaagtcgaagtggcttttactgccgactatatcgattacatggcggagtgggcacggcgttacgagggcgagattattcaaagcgatcgtccaggagaaaatattcttttgtttaaacgtgcgcttggtgtgactaccggcattctgccgtggaacttcccgttcttcctcattgcccgcaaaatggctcccgctcttttgaccggtaataccatcgtcattaaacctagtgaatttacgccaaacaatgcgattgcattcgccaaaatcgtcgatgaaataggccttccgcgcggcgtgtttaaccttgtactggggcgtggtgaaaccgttgggcaagaactggcgggtaacccaaaggtcgcaatggtcagtatgacaggcagcgtctctgcaggtgagaagatcatggcgactgcggcgaaaaacatcaccaaagtgtgtctggaattggggggtaaagcaccagctatcgtaatggacgatgccgatcttgaactggcagtcaaagccatcgttgattcacgcgtcattaatagtgggcaagtgtgtaactgtgcagaacgtgtttatgtacagaaaggcatttatgatcagttcgtcaatcggctgggtgaagcgatgcaggcggttcaatttggtaaccccgctgaacgcaacgacattgcgatggggccgttgattaacgccgcggcgctggaaagggtcgagcaaaaagtggcgcgcgcagtagaagaaggggcgagagtggcgttcggtggcaaagcggtagaggggaaaggatattattatccgccgacattgctgctggatgttcgccaggaaatgtcgattatgcatgaggaaacctttggcccggtgctgccagttgtcgcatttgacacgctggaagatgctatctcaatggctaatgacagtgattacggcctgacctcatcaatctatacccaaaatctgaacgtcgcgatgaaagccattaaagggctgaagtttggtgaaacttacatcaaccgtgaaaacttcgaagctatgcaaggcttccacgccggatggcgtaaatccggtattggcggcgcagatggtaaacatggcttgcatgaatatctgcagacccaggtggtttatttacagtcttaatgagtgaaagaggcggaggttttttcctccgcctgtgcgcgtcagagtttagcgaatttttcgagggtgcgaataagctgtgtgacgaagccatattcgttatcgtaccaggcgaccgttttcaccagttgtaaatcgcccacggcggtaatttccgtttgcgtggcatcaaacaccgaaccgaaatggctgccaatgatatcggaagagactatttcttcatcggtataaccaaatgactcgttattggtggttgcttgtttaagtgcgttattcacctcttcggcagtcacttttttccgagaatcgataccagttcagtgaccgaacctgttttcaccggcacgcgttgcgcatgacctttcagtttgccgctcagttccgggatcaccagaccaatggcttttgccgcccccgtagtgtggggaatgatattttctgccgctgcgcgtgaagcacgtaaatctttaccacgcgggccatccaccagtgactgggtgccagtataggcatgaatggtcgtcatcgtgccgacttctatcccgaaactgtcatgcaaggctttggccatcggcgcaagacagttagtggtgcatgacgccacggaaacaatggtgtcgttgccatccagagtgtcgtcattgacgttataaacgatagttttcatttcaccggcaggggcggaaatcaacaccttcttcgcaccagcatcaagatgcgcctgcgatttctcggcggaggtataaaagccagtacattcgacaatgatttctgcacctttcgctttccacggaatatttttagcctctttttcggcgtaaaccgcgatacttttcccatcaacgataagtgaatcttccgtaaaatcaacgctccaggggaatggtccgtagtttgaatcatgtttcagcaggtaggcgagaatttatggggaagtgagatcattaatagcgacaacgtctatgttgcttttgacttcaagtaatcgacccaacaccagtcgaccgatacgaccaaaaccgttaataccaactttactcatggttttctcctgtcaggaacgttcggatgaaaattgatcctttccaagcttagaccaggatggcgggatgggcaatctccattctcacagtgaaacgtaacgtactgaaaacgggtgaacaatatttaatgaaattttgagaaaagcccgttatgttaacggaaaattatgttaaagcaggaaatgttatggaaaataaatattcaaggttacaaatcagcattcactggctggtctttttactggttatcgcagcgtattgcgcaatggagtttcgtggtttcttcccacgtagcgatcggccactcatcaacatgattcatgtttcctgtggcatctcaattctcgtgctgatggtcgttcgtcttttgttaaggctgaaatacccaaccccgccgattatacctaagccaaaaccgatgatgacgggactggcgcatttgggacatttggtgatttatctcctgtttattgcgctgccagtgattggtttggtgatgatgtataaccggggcaacccgtggtttgcgtttggtttgacgatgccttacgcttcagaggccaatttcgaacgggtagatagcttaaagtcgtggcatgaaacgctggcgaatctgggatattttgtcatcgggttgcacgctgcggctgcactggcacaccactatttctggaaggacaacacacttctacgcatgatgccgcgtaaacgttcctgaaggatatttaaagaaaacgcctgtactaaaaccgacccgtggtacaggcgaagaatacgggtctacatcggaagcgcctattatatttatttgtatgataaataaaaccataatccttgcccatacgtccatctggcttatttttaatcaattcacccgatctttgatctcatcaacggtatcaaaataaaccagcgtataacgttcaaatcgaacataagattcgataaaccatggaggttatatgaaaaaactggcacttattttgtttatgggaacgcttgtttccttttatgccgatgccgggcgcaaaccctgttctggttcgaaaggggggatctcacactgtacggcaggcggcaaatttgtctgtaatgatggttctattagtgcatcgaaaaaaacatgcactaactgaagtgtaaaaggggtgccatgagaaaatgaatctgctagtcaaatgcgcggggaaaatccccgcgcttgcccttacctggacgtgcaggccatgagcgcagcaacctccttatcaccgtcccggaaccgcagttcgtagagcgtttgtcgggtcaggagtgtgaatgtcagaatcgtaatgcagataatgagcagacacaccaccagagggttgtgcttcatagcctttctccttgccggatggcgggtaagaggctaagatctgaattgctaggttcattcgttggcctcggttgatagaaatatcggtcggggccttcgtctttctgattcccggttagcctgaaaacagaaagtctcaggcacccgcaggcatcctatgaggtttccttagggacgaaaataatcacttcacgaaattgcgtgctgttttccagaatttttcgtcattcgggttagccagtttagccattcgttactctcttcattccaatagcattaattttctatgcaataattgttgtaaaaatgtgacgcaaagaggtttttggtcataagtaattaccgtcaagtgccgatgactttctatcaggagtaaacctggacgagagacaacggtaatgaatacaactccctcacagcgattaggttttttgcatcacatcaggttggttccgttatttgcctgcattctaggcggtatcttagttctattcgcattaagttcagccctggctggctatttcctctggcaggccgatcgcgatcagcgtgatgttactgcggagattgagattcggaccgggttagcgaacagttcagattttttgcgttcagcccggatcaatatgattcaggccggggctgcgagtcgtattgcggaaatggaagcaatgaagcgaaatattgcgcaagccgaatcggagattaaacagtcgcagcaaggttatcgtgcttatcagaatcgaccggtgaaaacacctgctgatgaagccctcgacactgaattaaatcaacgctttcaggcttatatcacgggtatgcaacctatgttgaaatatgccaaaaatggcatgtttgaagcgattatcaatcatgaaagtgagcagatccgaccgctggataatgcttataccgatattttgaacaaagccgttaagatacgtagcaccagagccaaccaactggcggaactggcccatcagcgcacccgcctgggtgggatgttcatgattggcgcgtttgtgcttgccctggtcatgacgctgataacatttatggtgctacgtcggatcgtcattcgtccactgcaacatgccgcacaacggattgaaaaaatcgccagtggcgatctgacgatgaatgatgaaccggcgggtcgtaatgaaatcggtcgcttaagtcgtcatttacagcaaatgcagcattcactggggatgacagtagggactgttcgacagggcgcggaagagatttatcgtggcaccagcgaaatttcagctggcaatgcggacctgtcatctcgcaccgaagaacaagcggcggctatcgaacaaactgccgccagcatggagcaactcactgcgacggtgaaacagaatgcggataacgcgcatcatgccagcaaactggcgcaagaggcttctattaaagccagcgatggcgggcagacggtttccggtgtagtaaaaacgatgggcgctatctccacgagttcgaagaaaatttctgagatcaccgccgtcatcaacagtattgctttccagacgaatattctggcactgaatgctgccgttgaagccgcgcgagcgggtgagcaagggcgtggatttgccgttgtcgccagcgaagtacggacactcgcaagtcgcagcgctcaggcggcgaaagagattgaaggcttgatcagtgaatcagtcaggttaattgacctggggtcggatgaggtggcaacggccgggaaaaccatgagcactattgttgatgccgtcgcgagtgtcacacatatcatgcaggaaatcgccgccgcctcggatgaacaaagtagaggcataacgcaggttagccaggcgatttctgaaatggataaggtgacgcaacagaatgcttctctggtagaagaggcctcagcggcggcggtgtcccttgaagaacaggcggcacgattaactgaggcggtggatgtattccgtctgcacaaacattctgtgtcggcagaacctcgcggagcgggtgaaccagttagtttcgctacggtgtgaaaatgttcaaggagggatcgacagatcccttcacctttcagaacggcattgattttcgaatagcgttaatcatcaactggcaaccagaagagaacgtcgcatctacgcgggtcagtattccaatcggttcgcctgcaccatgtcccggaacaggcagggccaccagcgtggcatgacgcaggtcgtcttttacagcgccagaagggacaaaccacacgtaatcgtattcaaccgtaagttgacgagatagcgaagcagacagcgtttcgatacaacccgaaggaattttacagccctggctctgcactaatgcatctgaatgctggcgtggcgcagtgccttctggtgatacaacgaccggccattccagcacccggcttagcgttacgttctcctgaagtagcgggtgattagggcggacaaccagcttcaacgattcaagaaacagcagttcgtaattaagcccggtcatcagttcaggatctgacatccgaccaatgccgatatcgatttccccggtttttaaacccgccagaatcatagggttactcattgtcgcaacttgcaaggtcgtctctttttgttgctgatgaaactgacctataaccgaaggtaatatccccagtgccgcagtaggtagtgcaccaaccctgacgacatcattattaagaccttctttacgatgaagcgaccgtccggcagtgttgatggcgtcaagaactctgactgcatgcgttaaaaattgttcgccgggtaaggtaagttgcgccccctgacgaccacgctcaaacaagcgagcgccagtcagctgctccagttcattcaatgtcttagagagcgcaggttgactcaaattaagggtttcagccgcgcgccccaaagttccttgttgtgcgacagctacgaatgtatgaaggtggcgcaaacggatgcgctgactaaacagactatttttttccataagcgatgttaaaaacgaagcggtgtcgctgacaagtgaagttgtttgattatgataacttgattgcaaaatattattaacaattaaagcaattatgttacagcaaaatggataatattgatgttttcgcggcgagatcacagtttgtaaattcttcccgcaagagtgaatgcggttacctacactccagattactgaccactggaggcagacactatggcgaacagcatcacggcggatgagattcgggaacagttttcgcaggcaatgtcagccatgtaccagcaagaagttccgcaatatggcacgctgctggaactggtagctgatgtgaatctggctgtgctggaaaacaatcctcaactgcacgaaaaaatggtaaatgcagacgagctggcgcgactgaatgttgaacgtcatggggcgattcgcgttgggactgcacaagagcttgctactcttcggcggatgtttgccattatggggatgtacccggtgagctattacgatctctcgcaggcaggggtgccggtacattcgacagcatttcggcccattgatgatgcttctctggcgcgtaatcccttccgcgtttttacctccttactccgccttgagcttatcgagaacgaaattttgcgccagaaagcggcggagattctgcgtcagcgcgatatcttcaccccacgttgtcgacaactgttagaggaatatgagcagcagggcggttttaacgaaacacaggcacaggagtttgtgcaggaagccctggaaacgtttcgctggcaccagtcagcaacggtagatgaagaaacctatcgcgcattgcacaacgaacatcggttgattgctgatgtggtctgttttcctggatgccatatcaaccacctgacgccacgtacgctggatattgaccgggtgcagtcgatgatgcctgaatgcggaattgaacccaaaattctcatcgaggggccgccgcgccgcgaggtaccgattttactacgccagaccagctttaaagcactggaagagacggtgttgtttgcggggcagaaacagggcacgcataccgcgcgctttggtgaaattgagcagcgtggcgtggcattaacgccgaaagggcgacaactgtatgatgatcttctgcgtaacgctggaaccgggcaggataatctcactcaccaaatgcatttacaggaaaccttccgcacttttcctgacagtgagtttttaatgcgtcagcaagggttggcatggttccggtaccgtctgacgccttcgggtgaggcgcatcgtcaggcgattcatcctggagacgatccacagcccttaattgaacgtggttgggtagtggcgcaacccatcacctatgaagatttcttgcccgttagcgcggcggggatcttccagtcaaatctgggtaatgaaacgcagacacgcagtcacggtaatgccagtcgcgaagcatttgagcaggcgttgggttgtccggttttggatgagttccagctttaccaggaagcggaagaacgcagtaaacgtcgctgtggtttgctttaaaatctgaccatccgcctttgcaaaaatttgcctgattttacaaacgaatcaggctcatcccatcgacataaaaaaaatgccgatttatgcatattctctcagttcaacaattggattattaataaatattgtctagagtgagcggtcataaataagcactttcttgccgctgaaaacgaccagcgcgggaccattcacaacaccagaaggactcactttcaggtatggatcgtagacgatttattaaaggttcaatggctatggccgccgtgtgcggtaccagcggcattgcttctcttttttctcaggcggcattcgcggcagattctgatattgccgacgggcaaacccagcgttttgacttctccattctacagtcaatggcgcacgacttagcgcaaacagcgtggcgtggtgcgcctcgtccgttacctgacacgctggcgacaatgacgccgcaggcttataacagtattcaatacgacgccgaaaaatcgctctggcataacgttgagaaccgtcaactggacgctcagttcttccatatgggaatgggattccgtcgccgcgttcgtatgttttctgtagatccagcaacacatctggcgcgtgaaattcactttcgcccggagttgttcaaatacaacgatgcaggtgttgatacaaaacaattagaagggcaaagcgatctcggctttgccggttttcgcgtgtttaaagcccccgaactggcgcgccgtgatgtagtatcatttctcggcgcgagttatttccgcgccgttgatgatacatatcaatacggtttgtcggcccgcggcctggcgatcgacacttacaccgacagtaaagaagagttccccgactttaccgccttctggtttgatacggtaaaaccgggggcaactacctttaccgtttatgcgttgctcgatagcgccagcattactggtgcctataagttcactatccattgtgagaaaagtcaggtgattatggatgtggaaaatcacctgtatgcgcgcaaagacattaaacagctgggcattgcgccgatgaccagtatgttcagctgcggtactaatgaacgtcggatgtgcgatacaattcatccgcaaattcatgactctgatcgtctgtccatgtggcggggcaacggcgagtggatttgccgtccgctgaataatccgcaaaaattgcagttcaatgcttacaccgacaacaacccgaaagggtttggtttattgcaactggatcgtgacttctcccattatcaggacattatgggctggtataacaaacgcccaagtctgtgggtggaaccgcgtaacaagtggggtaagggcaccatcggcctgatggaaatcccaacaacgggcgaaacgctggataacattgtctgcttctggcagccagaaaaagctgtaaaagcaggtgatgagtttgcattccagtatcgtctgtactggagtgcgcaaccgcctgttcattgcccattagcgcgcgttatggcgacgcgtaccggcatgggcggtttctcggaaggttgggcgccaggtgaacactatcccgaaaaatgggcgcgtcgttttgccgtcgatttcgttggtggtgatctgaaagctgccgcgccaaaaggcattgagccggtgattacgctttccagtggggaagcgaagcaaatcgaaattctctatattgaacccatcgatggttatcgtattcagtttgactggtatccgacttcggactccactgatccggtcgatatgcggatgtatctacgttgtcagggggacgctatcagtgaaacatggctgtatcagtatttcccgccagcgccggataaacgtcagtatgttgacgaccgcgtgatgagttaatcgttttttcttcggcaccttcttcgggaggtgccgtctggttaaacacgatcccgctcgcatttttccctaagttaaatgagtaatctgatggtgtgtatttcagatacaccttgtcagccactaacagggagtgcgtatgtttccagaataccgagatttaatatcccgtctgaaaaacgaaaatcctcgctttatgtccttgttcgataaacacaataaacttgatcatgaaattgccagaaaggaaggttccgacggtcgagggtacaatgcggaagtggtccgcatgaaaaaacaaaagctacagttaaaagatgagatgctcaaaatcctgcagcaggagagcgtcaaagaggtgtaaactttcctaagccgccagccaggcggcttttttaacaactgcatggattgactggagataagatgactgaaacgataaaagtaagcgaatcacttgaattacatgctgttgcagaaaatcacgtcaaacctctttatcagttaatctgtaaaaataaaacctggttacagcagtcgctaaactggccgcagtttgttcaaagtgaagaggacacgcgaaaaacggtgcagggtaatgtgatgttgcatcaacgcggctatgccaaaatgttcatgattttcaaagaagatgaacttatcggcgttatctcgtttaatcgtattgaaccactgaataaaaccgctgaaataggctactggctggacgaatctcatcaggggcaggggatcatttctcaggcgctgcaggcattgattcatcattacgcccagtctggtgaacttagacgcttcgtgatcaaatgtcgggtggacaatccgcaaagcaaccaggtcgctttgcgcaatggttttatccttgaaggttgcctgaaacaggctgagttcctgaatgatgcctatgatgatgtgaacttatacgcgcgtattatcgattcacaataaccctgccagcggcgttcgcgtaatgcgctcctcgccgttaatgacttttggaccacggacatgaaccgtgtcgccatcaaaggcttcaacgacggcgtggtcggttaactccacatggttttcaattatcaccgcacctgtaatacggctctcaccttgtatgacaacgtgctcgtcgagcagaatcggtccgccacgtaccacggcatttccgccaaccaagacatgatgttttaacacacaattaccttccacaatggcatattccgccacctgcgaactgtaatgaatcgtcggaatggcatcttcttctatgccagctttcacctgcgcgtgaccgtagactttagcgcaatcgcatagccagacattgttctcttcattaccttcaatactggcaaaatcaaaaacttcggcgcgatgttcaataaaagcataccggacgacggcatcgccataaatttgtgcctggtggacaatacgcgaggcgctaacccttgcgcgatcataaatttggagcaggagttgatggtcgggcgttaagccttgtgcggcgacgatcatagaatgttgatcaattaaggcgtgaccaaatattctacattgcccgtaaactaatgagtcatgaatggtgacgctgtcacttatatatgcaccctggctgatttcactattatcgatccagacgttatccgttgcgtaaacctctccccacagcacgctggtgccggtgatacgcgtattaccggaaatcaccgctccgccgaacgcaatagcattctggtcgtaaatccagcaatttccttcttgtgctaacaccgtttcgcgatcgatccagccgccagcggttcctgctatcacatcgttaaaatcgctaatggcgataatctgccgtaataacacattttttttagtgccatcttcctgataactaaaggctcgctgttcttcacttagacgatatttgcgcatagcgttttcccacaggtgacttactataaccgtagcaaattctgcggctctggctatgctcgagaaaattccataaaatgcatttcaaatatactttataaattaaacaaaatgagtaagaagatgcagagcgataaagtgctcaatttgccggcaggctactttggtattgtgttggggacgatagggatgggatttgcctggcgctatgccagccaggtttggcaggtcagccactggttaggggatgggctggtgattctggcgatgatcatctggggattattgactagcgcatttattgcccgactcatacgctttccgcatagcgtgctggcggaagttcgccatccagtgctgagcagttttgtgagtttgtttccggcaacgacgatgctggtggcgattggttttgttccgtggtttcgcccactggcggtgtgcctgttcagttttggtgtcgtggttcagttggcttatgccgcctggcaaactgcgggattatggcgcggatctcaccctgaagaagctaccacgcctggactgtatctgccgacagttgccaacaactttatcagcgcaatggcctgtggtgcgttgggctacaccgacgccggtctggtgtttttaggcgcaggcgttttctcatggctaagccttgaaccggtgatcttgcagcgtctgcgcagttcgggagaattacccacggcactgcggacatcactcggcattcagctcgctcctgcgctggtggcttgtagtgcctggctgagcgtcaacggcggcgagggtgacacgctggcgaaaatgcttttcggttatggactgctgcaactgctgtttatgctacgtctgatgccatggtatctctcccagccatttaatgcttcattctggagtttctcgttcggcgtatctgcactggcaaccaccggtttgcatctggggagtggcagcgataatggatttttccatacgctggcggtgccgctgtttatctttaccaattttattattgcaatactgctcatccgtacttttgcgcttctgatgcagggaaaattgttagtcagaaccgagcgcgccgttttaatgaaagcagaggacaaagaatgatcattcgtgacgaaaactattttactgataaatatgaattaacccgcacacactctgaagtactggaagcggtgaaagtggttaaaccgggtaaaacgctggatctgggctgtggcaatggtcgtaacagtctttacctggcagccaatggttatgatgttgacgcatgggataaaaatgccatgagtatcgccaacgtcgagcgcattaaatccattgaaaatctggataatttacacacccgagtcgttgatctgaataacctcacatttgatagacagtacgattttattctttcgactgtggtgctgatgttccttgaggctaaaaccatccccgggttgattgccaatatgcaacgttgcactaaacctggtggttacaacctgattgtggcggcgatggataccgctgattatccatgtaccgtcggcttcccgtttgccttcaaagagggagaattacgtcgatattacgaaggctgggagagggtgaaatacaatgaagacgtcggcgagctgcaccgcaccgacgccaacggtaatcgtattaaactgcgtttcgccacgatgctggcacgtaaaaaatgacccggtaagcacaaaacgcgtgaaaattccccacgctgagatgatttactgttcttcttttcggtaagcatattttttatcgaagggatgtgaaattaatcacagtagtcgaagtttttagcagcttaacttactgaaatttaagtactgatgattgacttagcccctttttcggcattgactatgtcgtctgaaaaggggctgaaaaatttattttcaccaacactttttttgccacaacacgaagcggcgctttttgctataacttagaaagtaatataatcatctcaggaaactattcatgcgtaccacatcatttgcgaaagttgcagctttatgcggcttattggctctgtctggttgtgcatctaaaatcacccagccagataaatattctggttttttaaacaattactctgatttaaaagaaacaacctcggctacaggtaaacctgttttacgttgggtagacccgagttttgatcaaagcaaatatgacagcatcgtctggaacccaatcacttattatccggtaccgaaaccgtcgacccaggtagggcagaaagttctggataaaattttgaactataccaacaccgaaatgaaagaagcgatagcgcagcgtaaaccactggttaccaccgctgggccgcgtagtctgattttccgtggggccattaccggtgtagataccagcaaagaagggctgcaattctatgaagtggttcctgttgcattagtggttgcggggacgcaaatggctacaggccaccgtaccatggatactcgcctctattttgaaggtgagctgattgatgcagcgactaataaaccggttatcaaagtcgttcgtcagggcgaaggtaaagacctgaataacgaaagtacgccaatggctttcgaaaatattaaacaagttattgatgacatggcgaccgatgccaccatgtttgacgttaacaaaaagtagttccagacgcgccatcgttagatggcgctttttatccggtgcgccgtaaaaccccatccttcagggcggggatataaggcgcggttttccacctgaccaggtgtttgctgttgttcaatgtattggcggatgacggatattggcgcacctccgcagctactggcaaaatagccaggactccacaaaacgcctttgtagtaatacctgaatgcaatatctggtcgatctcgtcgcagtcacctacccgatacgcctttgaggctgtttaccagactggatatcgccagtttgggaggatagttaattaacaaatggacgtgatctggttcgccatccatttcaaccagttcagcttcaaaatcagcacatacatttgaaaagtaagtgcgtagtttttctgtcgcgtcatggtcaaaaatctggcgtcggtatctggtgacaaagagcaggtgaacatgcatcaggaaaacacaatgccttccacgccggatatcggtttcttttttcacagaccaaagtatcatttgacctgtgaaacgattacaggcatttaaattccagttaagacccggtggtcaacaggagtgtgaaatgaggcgcttcgcaggcgcatgtcgtttcgttttcaatcgtgctctggcacgtcagaatgagaatcatgaggccggtaataaatacatcccttacgggaaaatggcttcctggctggttgagtggaaaaatgccactgaaacgcaatggcttaaagattctccctcacagccattgcaacagtcactgaaagaccttgagcgggcttacaaaaacttcttccggaagcgggctgcttttccccgattcaaaaagcggggacagaatgatgcattccgctacccgcagggcgttaagctcgatcaggaaaacagccgtatttttctgccgaaactgggctggatgcgctaccggaacagccgtcaggtcacgggtgttgtgaaaaatgtcactgtcagccagtcctgcggtaagtggtacatcagtattcagacagaaagtgaagtatcaactccggttcacccttcagcatcaatggtcgggctggatgctggcgtggctaaactcgccacgctgtcagatggcacagtctttgagcctgtaaacagttttcagaaaaaccagaagaagctggcgagacttcagcgacagttaagccgcaaggtcaaattcagcaacaactggcaaaagcagaaacgcaaaatacagcgactgcattcctgtatcgcaaatatccgcagggactaccttcacaaagtcacaacggccgtcagcaaaaaccacgcaatgatagtcattgaggatttgaaggtcagcaacatgtcaaagtcagcagcgggtacggtcagccagccggggcgcaatgtccgggcaaaatcaggtttaaaccgttcgatactggatcagggctggtatgaaatgcgccgccagcttgcgtataagcagctctggcgtggcggtcaggtgcttgctgttccgccagcgtatacaagccagcgttgcgcgtactgtggtcatacagcgaaagagaaccgcctgtcacaaagtaaattcagatgccaggtatgtggatatacagcgaacgccgatgtaaatggcgctcgcaacattttagcggcggggcacgccgttcttgcctgtggagagatggtgcagtcaggccgcccgttgaagcaggaacccaccgaaatgattcaggcgacagcctgaacgtagcagggatccacgtccttcagggcgtggaggatgtcaatatcggtttctgtcagcgattaaattcaacaccacgtaacaaacgcctccggcaattaatccccaaaacgcagaaccaatcccgaccagcgtcaatccacttgccgttaccagaaatgccaccaccgccgcgtctcgctcacgctcattatgcagcgcctgatacaaactgccgccgatggtacttaacagcgccagacctgccagcatctggatccaacttacgggcagggcagccatcatcccggtaatggcactaccaaacagacctgcgagcaaatagaaaatgcctgcaacggcagcggccagccaacgttgatctttatccggatgcgcttccgggctttggcaaatagccgcggtgattgccgcaataccgacggaataaacgccgaaaggggaaaaaaccagtgccagcaatccagtaaatacaattaatggcgaaacaggagccgaatatccagctgctttcattgctgcgatacccggtgcgttttgcgatgccatcgtcaccagaaaaagggggagtgcaacgctcaggctgtgagcaaacgaaaaatcaggggtaatataagtggggagaacgggtttaaagacaacatcagttgtgacaacgtcaccttgcgcgatgacgatcacgatcccaataatcatcgcggcaattaccgcatagcgcggcgcaacggccttggttgccagccataccagcaacatacttccacacaacgtaaattgaccgtccagactggcaaacgcctgtaaaccaaagcgtaataaaatcccggcaagcattgccgccgcaagcgagtgcggaataatgcgcatcagacgagcaaagagtcccgttatgccgcagaggactattagcgcgttggtgacaataaaaacgccgatggcttcgttaagtgttagtccctgcaatccggtgaccaacaaagccgcgccaggcgttgaccatgcggtgagaacaggtacgcgataccataatgtcagagtcagcgtactgacgcccattgccagccccagcgccgtcatccagccagagatttgtgcagtggtggctccggcgacaatcgctgcttgccagattattgccgctgaactggcgtagccaattaataccgccagaaaccccgccagtagcgtgggtggaggaatagaaaacagacgcatagtcacctcgtgcgttatagcgtacaggcaccgtagcatttgtccgttataacgcacaagtgataaacttccgttttgccggaggagtcgcatggaaaatctcgctcgctttttatccaccacacttaaacaactacgccagcagcgcggctggagtctttcgcgactggcagaagcgacgggcgtttctaaagcaatgttagggcagattgagcgtaatgagtccagtccgacggtcgcgacattatggaaaattgccaccgggttgaacgtaccattttcaacatttatttctccgccgcagtccgctacgccttcagtttatgatccacaacagcaggcgatggtgatcacttcgctgtttccttatgatccacaactctgctttgaacacttctcgattcagatggcatctggtgcaataagcgaatcgacgccccatgagaagggggtaatcgaacatgtcgtcgtcattgatggacaacttgatctgtgcgttgatggggaatggcagacccttaattgtggggaaggcgttcgatttgctgcagacgtcacgcatatctatcgtaatggtggggagcaaaccgtacattttcattccctcatccattacccgcgcagttaagcgggaaaactatttcgcaacgtcgcgcttgtggctaaaatagccgccatttttcagctactggataagaatgtgaccgtatcttctcatcgacttgaactgttaagcccggcacgcgatgccgccattgcccgcgaagctattttgcacggtgccgatgctgtttatatcggcggccctggttttggtgcccgtcataatgccagtaatagcttgaaagatattgccgagctggtgccgtttgcccatcgttatggtgcaaaaattttcgtcacgcttaacaccattttgcatgatgatgagctggaacccgcgcaacggctgattactgacctctaccagaccggtgtcgatgcgctgattgttcaggatatggggattctggaacttgatattccgccgattgaactgcacgccagtacgcagtgcgacattcgtacagttgaaaaagcgaagttcctctctgatgttggcttcacgcagattgtgctggcgcgagagctgaatcttgatcagatccgcgcgattcaccaggctacggacgcgaccattgaattctttattcatggggcactgtgcgtggcctattcgggtcagtgctacatttctcatgcgcaaacagggcgtagcgccaaccgtggcgattgctcgcaggcgtgccgtttgccatacacattgaaagacgatcaggggcgggtggtttcctatgaaaaacatctgctgtcgatgaaagataacgatcagactgccaacctcggcgcgctgattgatgctggtgtacgctccttcaagattgaagggcgttacaaagatatgagctacgtgaagaatatcaccgcccattatcgccagatgcttgatgccattattgaagaacgtggcgatctggcgcgcgcttcatcaggtcgtactgaacatttctttgttccatcgacggaaaagactttccaccgtggtagcacagattattttgtgaatgcccgtaaaggcgatattggcgcgttcgattcgccgaaatttatcggcctgccggtaggcgaagtagtgaaagtggcgaaagatcatctcgatgttgccgttaccgagccactggcaaatggcgatggcctgaacgtgttgattaaacgtgaagtcgtcggttttcgtgccaatacggtcgagaaaaccggagaaaatcagtaccgcgtctggcccaatgaaatgccagcagatttgcacaaaattcgtccacatcacccactaaaccgtaatcttgatcataactggcagcaggcactgacaaaaacctccagcgaacgtcgggtggcggtagacattgaactgggcggctggcaggaacaactgattctgaccctcaccagtgaagagggtgtcagcatcacgcatacgctggacgggcagttcgacgaagccaataacgccgaaaaagcaatgaacaatctgaaggatggtctggcaaaactggggcaaaccctctattacgcccgcgatgtgcaaattaatttgccgggggcgctgtttgtaccaaacagtctgttaaaccagttccgccgtgaagctgctgacatgctggatgctgcgcgtcttgccagttaccagcgcggcagccgtaaaccggttgctgatcctgcgccggtttatccgcaaacgcatctgagtttcctcgcgaacgtatacaaccagaaagcgcgtgaattttatcatcgctatggtgtgcagctgattgacgcggcgtatgaagcacatgaagagaagggcgaagtcccggtgatgatcaccaagcattgtctgcgctttgcctttaatctgtgcccgaaacaggcgaaaggcaatatcaaaagctggaaggcgacgccaatgcaactggttaacggcgatgaagtattaacgctaaagtttgattgccgcccatgcgagatgcacgtcattggcaaaatcaaaaatcacatactgaaaatgccgttaccgggaagcgtagtggcatccgtaagtccggatgagctgctgaaaacattgccgaagcgaaaagggtaaaacgccagttttctggttactcacaacttattgaatctgcatgatattgcctgccgggtaaggcgttacgccgcatccggcatcaaatgactcaacgttgtcccgcttctggtttgcgcgatttttgccagtaaaaatgctcgcgcaaaccttccgccgactcttccgccacagcacgcaattcatcgctgtccgcttcatgacgcagctgatgatccacattctttacccacacaaattcatgtcctttgtgccctgccatgagttgtcctgaaaacagagcacacgttaataagacaaccgataacgccttcgtaaacatcctgccacctttttcttaccttttgccgctatgatgccgatcgtttcttgaggttattattcagttttgcaaattagcgcaaagaaattctggaatcttccttcctgattttgcattgcattctgccgttgcggcgatttagtgctattttcgagcaaattacacacggaggtaaacactaatgtttactttgttgatatactcagcggcagggaggcgatgtgaaacaaagcgagttcagacgttggctcgaatctcagggcgtcgatgtagcgaatggcagcaaccatttgaaactcaggtttcatgggaggcgcagtgtcatgccgcgtcacccctgcgatgagattaaagaaccattgcgtaaagcaatcctgaaacaactcggtttgagttaatcgccaattaaaaaggttaatgacatgcgagagacagtcgaaattatgcgttatcccgtcactcttacacccgcgccggaaggcggttatatggtttcttttgtggatatccctgaagcgttgacccagggcgaaactgtcgctgaagcgatggaagcggcaaaagatgctttactgaccgcatttgatttttattttgaagataacgagcttatccctttaccttcgccattaaatagtcacgatcactttattgaagtacctttgagcgtcgcctctaaggtattgctgttaaatgcttttttacagtcagaaatcactcagcaagagttagccaggcgaattggcaaacctaaacaggagattactcgcctatttaacttgcatcatgcgacaaaaatcgacgccgtccagctcgcggcaaaggcgcttggcaaagagttatcgctggtgatggtttaattacagttaacgaaaagttgtcatttttaacaactgatatagactgccgaatcatctgcacataattacgattcgataatgaaaaaataccagcagcttgcagaacaattacgcgagcagattgcgtcgggtatctggcaacccggcgatcgtttgccttcgttgcgtgaccaggtggcgctttcaggcatgagctttatgactgtcagccatgcctatcagttgctcgaaagtcagggatatattatcgcacgaccgcagtcgggttattacgttgcgccacaggcaataaaaatgccgaaagcgccagtcattccagtcactcgagatgaagcagtcgatatcaacacttatatttttgatatgttgcaggccagtcgcgatccgtcggtcgttccgtttgcctcggcctttcccgacccgcgacttttccccctccaacaactaaaccgctcgctggcgcaggtaagcaaaaccgccacagcgatgagcgtgattgaaaacttaccgccaggaaacgcagaactgcgtcaggctattgctcgtcgctatgccttacagggcatcaccatttctcctgatgaaattgtcattactgccggggcgttagaggcattaaacctcagtttgcaagcggtaactgaaccgggcgattgggtgatagtagagaatccttgtttctacggtgcgttgcaggcgctggagcggctacggctgaaggcgttatcggtggcgacggatgttaaagaagggatagatcttcaggcgctggaactggcgttgcaggagtatccggtgaaagcgtgctggctgatgactaatagccagaatccactcggatttaccttaacgccgcaaaaaaaagcacaactggtggcgttgctcaatcagtacaacgtaacgctgattgaagatgacgtttacagcgaactttattttggacgggaaaaaccgctgcctgcgaaagcgtgggatcgccacgatggcgttttgcattgctcttcgttttcgaaatgtctggtgcctggttttcgtattggttgggtcgccgccggaaaacatgcacgtaaaattcaacgcttgcagttgatgagtacgctttccaccagctcaccgatgcaacttgcgctggtggattacctttccacgcgccgatacgacgcccatcttcgtcgcctgcgtcgccagcttgcggaacgtaaacaacgtgcctggcaggcactgctgcgttatctgcctgcggaagtgaaaattcatcataatgacagtggttactttctctggttggagctccccgagccgttagatgccggcgaattaagcctggcggcactgacgcatcatatcagtattgcgccgggtaaaatgttttctaccggtgaaaactggtcacgttttttccgttttaataccgcgtggcagtggggagagcgtgaagaacaggcggtaaaacaattaggcaaacttattcaagaacggctgtaatagcgtttaatttaattcctcttagattgggtaatatgaatttcgaatagcagtcatatttcctaactccttgactatactccagaagataaccttacagacggcataatgcgcggtagctcacaacctgaataaattttctcaggggcgaaggtgtgcctgcaagccgccgtctatggttaaacaaggagatatttttacggcacggcggctgaacaattaattacgacaggagtaagaccttatgagcaagacatttgcccgcagcagcctgtgtgcgctcagcatgacaataatgaccgctcacgccgccgaaccgcctaccaatttagataaaccggaagggcgactggatattatcgcctggccgggatacatcgaacgcggacaaactgataaacaatacgactgggtaacgcagttcgaaaaagagacaggctgcgcggtgaatgtgaaaaccgccgcgacttccgatgaaatggtcagtctgatgaccaaagggggttacgatctggttacggcatccggcgatgcctcgctgcgtttgattatgggtaaacgcgtgcagccgattaataccgcattgattcccaactggaaaacgctcgatccgcgcgtggttaaaggcgactggtttaatgttggcggcaaagtttacggcacaccttaccaatgggggccgaacctgctgatgtacaacactaaaaccttcccgacgccgccggatagctggcaagtggtttttgttgagcaaaatctgccggacggcaagagcaataaaggccgcgttcaggcttatgatggccctatctatattgcggacgctgcgttgttcgttaaagccactcagccgcagttgggcatcagcgatccgtatcaactcaccgaagaacagtaccaggcggtgctgaaagtgctgcgcgctcaacacagtttgatccatcgctactggcatgacactaccgtgcaaatgagcgatttcaaaaacgagggtgtggttgcttccagtgcctggccctatcaggccaacgccctgaaagccgaaggccagcctgttgctaccgttttcccgaaggagggtgttaccggttgggctgataccaccatgctgcatagcgaagcgaaacatccggtttgcgcctacaaatggatgaactggtcattaacgccaaaagtgcagggcgatgtggcggcctggtttggctcgttaccggtagtgccggaagggtgtaaagccagtccgttattaggcgaaaaaggttgtgaaaccaacggttttaactatttcgacaaaatcgccttctggaaaacgcctatagcagaagggggcaagtttgttccctacagtcgctggacgcaggattacattgccattatgggcggtcgctaacttcgctggggtgctttatgacgtacgcagtggagtttgacaacgtctcgcggttgtacggtgacgtgcgcgcagtagatggcgtcagtattgcgataaaagatggtgagttcttctctatgctggggccgtccggctccggcaaaaccacctgcctgcgcctgattgctggcttcgaacagctttccggcggggctatctctatctttggtaaacccgccagcaatctgccaccgtgggagcgggacgtgaatactgtctttcaggactacgcgctatttccgcatatgtcgattcttgacaatgtcgcctatgggctgatggtcaaaggcgtgaataaaaagcagcggcacgcaatggcgcaagaggcgctggagaaagtggcgttggggtttgtacatcaacgtaaaccgtcacaactttctggtggtcagcgccagcgggttgctatcgccagagcattggtgaatgaaccgcgcgtattgctgttggatgaaccgctcggcgcactggatctcaaattgcgtgagcagatgcagctggaactgaaaaaactgcaacagtctctcggtatcacttttatcttcgttacccacgatcagggcgaagcgttatcgatgtccgatcgtgtggcggttttcaataatggacgcattgagcaggtcgattccccgcgcgatctctatatgcgcccgcgcacgccgtttgttgccgggttcgttggtacatcgaatgtttttgatggactgatggcagagaaactttgtggcatgacgggaagcttcgccctgcgaccggaacatatccgcctcaacacccctggtgaactgcaggccaatggcacgatccaggcggtgcaatatcagggcgcggcaactcgttttgaactgaaattgaacggcggtgaaaaactgcttgtgagtcaggccaatatgacaggcgaagaactgcctgccacgctcacgcccggacaacaggtgatggtttcctggtcgcgtgatgtgatggtgccgctggttgaggagaggtgaatggcgatgaatgtattgcaatcaccttcacgtccaggtctgggtaaggtgtccggtttcttctggcataatccggggctggggctgtttttactgctgcttggcccgctaatgtggtttggcattgtctatttcggctcgctgctgacactgttatggcagggattttatacttttgacgatttcaccatgtcggtaacgccggaactgacgctggcgaatatccgtgcgctgtttaatccggcgaattacgacatcattctccgcacgctgactatggctgtggcagtcactatcgccagcgccattctggcttttccaatggcgtggtatatggcgcgctataccagcgggaaaatgaaagcgtttttttatattgcggtaatgttgccgatgtgggcgagctacattgttaaagcctatgcctggacgttattgctggcaaaagatggcgtggctcagtggtttttacaacatcttgggctggaaccactgctgactgcgttccttacattacctgcggtgggcggaaatacgctgtcaacttccgggctggggcgctttctggtgtttctctatatctggttgccgttcatgatcctgcccgttcaggcggcgcttgagcgtttgccgccgtcattgttgcaggcgtcggctgatctcggcgcacgtccacgacaaacctttcgctatgtggtgctgccgctggcaatcccgggtattgccgctggctctatctttaccttctcactcacactgggcgattttatcgtcccgcagctggttggtcctccaggatattttatcggcaatatggtttattcccagcagggggcgattggcaatatgccgatggcggcggcattcaccctggtgccgattattctcatcgcactgtacctggcgttcgtgaaacgtctgggagcgttcgatgcactctgaacgcgcaccgtttttcctcaaactggcggcctggggcggcgttgttttcctacattttcccatcctgataatcgccgcctatgcgtttaacactgaagatgcggcgtttagttttccaccgcagggcctgacgctgcgctggtttagcgtggcagcacagcgtagtgatattcttgatgccgtgacactgtcacttaaagtggcggcgctggcgacattaattgcgctggtgttagggacgctggcagctgccgcgctgtggcgacgagactttttcggcaaaaacgccatttcgctgttactgctgctgcccattgcgctgccgggcattgtcactggtctggcgttattaaccgcctttaaaaccatcaatctggagccgggatttttcaccatcgtggtcggtcatgcgactttttgtgtagttgtggtgtttaacaatgtcatcgcccgttttcgccgcacctcctggagtctggttgaggcgtcaatggatcttggggccaatggctggcaaaccttccgctacgtagtgttgccgaatctcagttcggcgttactggcaggaggaatgctggcgtttgccttgtcgttcgatgaaatcatcgttacgacctttacggcaggtcatgaacgaacgttaccgttgtggttgctcaatcagcttgggcgaccgcgtgatgtaccggtaactaacgtggtggcactgctggttatgttggtaacaaccttgccgatcctgggggcctggtggctaacccgcgaaggcgacaatggtcaataaccactgatacaggaatatgctatgcaacataagttactgattaacggagaactggttagcggcgaaggggaaaaacagcctgtctataatccggcaacgggggacgttttactggaaattgccgaggcatccgcagagcaggtcgatgctgctgtgcgcgcggcagatgcagcatttgccgaatgggggcaaaccacgccgaaagtgcgtgcggaatgtctgctgaaactggctgatgttatcgaagaaaatggtcaggtttttgccgaactggagtcccgtaattgtggcaaaccgctgcatagtgcgttcaatgatgaaatcccggcgattgtcgatgtttttcgctttttcgcgggtgcggcgcgctgtctgaatggtctggcggcaggtgaatatcttgaaggtcatacttcgatgatccgtcgcgatccgttgggggtcgtggcttctatcgcaccgtggaattatccgctgatgatggccgcgtggaaacttgctccggcgctggcggcagggaactgcgtagtgcttaaaccatcagaaattaccccgctgaccgcgttgaagttggcagagctggcgaaagatatcttcccggcaggcgtgattaacatactgtttggcagaggcaaaacggtgggtgatccgctgaccggtcatcccaaagtgcggatggtgtcgctgacgggctctatcgccaccggcgagcacatcatcagccataccgcgtcgtccattaagcgtactcatatggaacttggtggcaaagcgccagtgattgtttttgatgatgcggatattgaagcagtggtcgaaggtgtacgtacatttggctattacaatgctggacaggattgtactgcggcttgtcggatctacgcgcaaaaaggcatttacgatacgctggtggaaaaactgggtgctgcggtggcaacgttaaaatctggtgcgccagatgacgagtctacggagcttggacctttaagctcgctggcgcatctcgaacgcgtcggcaaggcagtagaagaggcgaaagcgacagggcacatcaaagtgatcactggcggtgaaaagcgcaagggtaatggctattactatgcgccgacgctgctggctggcgcattacaggacgatgccatcgtgcaaaaagaggtatttggtccagtagtgagtgttacgcccttcgacaacgaagaacaggtggtgaactgggcgaatgacagccagtacggacttgcatcttcggtatggacgaaagatgtgggcagggcgcatcgcgtcagcgcacggctgcaatatggttgtacctgggtcaatacccatttcatgctggtaagtgaaatgccgcacggtgggcagaaactttctggttacggcaaggatatgtcactttatgggctggaggattacaccgtcgtccgccacgtcatggttaaacattaaggataatattgcagatcgtaagagtatgagatgatcttgcgtactgtcagagcactgatttctctgacagtacgtgctgcgtgcaaaatcactacatcaaataaaccagccaaatctcatagagataagagtaaacaaaccaacagcagcaaagaaatttatcagtactacagttctactggaaacattcatttttgccaccttttatcattgcccctatgtgtatagtacgggttaagaaaatccgcaataatactcattctgaagatggataagggcaagttgctgtttgatgattttttctcaaactggtgaaaaaacttgatgcacgtcaaaaaatgacgcatatttgcgcgcgttttattcatctggctggacgcccgtacatgtctctctatcaacacatgcttgttttttatgcggttatggcagcaatcgcatttcttatcacctggtttctttctcacgataagaaacgcatccgtttcttaagcgcctttctggtgggggcaacatggccgatgagtttcccggtggcgctgttgttttcactgttttaaatcttactcactggcttgacggcaccacgcagacttatatcatttggatgaatcgataaatttcacaagtggctaaggagaaagtatgtcgcatctggatgaagtcatcgcgcgcgtggatgccgcgattgaagagagcgtcattgcccatatgaacgaattattaatcgccctgagcgatgacgcggagttaagtcgggaagatcgctacacccagcagcaacgtctgcgcacagcgatcgcccatcacggtcgcaagcataaagaagatatggaagcgcgccacgaacagttaaccaaaggcggcaccatcctctgattaaaatgagcgtctggctaccaaccaggcgccaaccacaagtaaaattgcgccacaaattgggccgaacaacgcccgtagtggtacgccatgactgcggaagatatccagcatcagaccgccaatcagctgactggcgaccagtacagcaatagttgtcgccgctcccacattctgatatccgctgatactggcgaagacaaaaaacgatcccagcaagccaggtataagtgtccaccagcgcacgctggacaccagttcgccaaaccccgccatgccttgtttaaaccataaaatagaaacaaagagcacaatccccaccagtgagttcagcaacatggcgatgagaatggtagaggaggtctgggtgatgcgcaccatcagcgtgttctggacaaccagaccaattccggcggcaatcaaaaaagcaagggtgagcgactgattcatccaatcgcgtccggttcagtgcgctcgtcgagttgcaactgcataaatgtcagatccagccaacgaccaaatttagtgcctacctgcggcatttgcgcggtgacgacaaatcccagcgactggtggagatgcagcgaggcctgattttgcgattcgatcccggcgaccatgacatgcttcccgcaatcccgcgcttcatcaatcaatcggcttaacaatttacgccccagacctttgccctgatgatcgggatggacataaaccgaatgttccacggtatggcgaaaaccatcgaaactacgccagtcgccaaacgaggcatatcccgtcactacgccgttttcctcgctcaccagcactggataacctgctaaagtccgcgcttcaaaccaggcaatgcggttatcagcatccaccgtttggtcattccagatagccgccgtatacaacacggcgtggttataaatttccgcaatggcagcacagtcggctttgcgggcaaaacggatggacatgtctggcctcaataaaataatgatgatgatgttatcaatactatcgaaaacagcccgaagcaacggattcctcgatgaaattattgcgtgttgcagaggggatgtgacggctgcaaacaaaaccaatcccgtgagcctgctactattgatggattcatgccaaaagcacaggagagcattatggggcaacaaaagcagcgtaatcgacgttgggttctggcctcgcgtccacatggcgcacctgttccggagaatttccgtcttgaagaagatgatgtcgccacaccgggtgaaggacaggtgttactgcgcacagtttatttgtccctggacccgtatatgcgtggacgtatgagcgatgagccatcttattcaccgcctgttgatattggcggcgtgatggtcggcggtacggtgagccgtgtcgtggagtcgaatcatcctgattatcagtctggcgactgggtgctgggctacagtggatggcaagactatgacatatccagtggtgatgatctggtgaaacttggcgatcatccgcaaaatccatcgtggtcgctgggtgtgctagggatgccaggctttaccgcttatatgggcctactggatatcggtcagcctaaagagggcgaaacgttggtggtagctgcggcgacaggaccagtgggggcgacggtggggcaaatcggcaaacttaaaggttgcagagtggtgggggtagccggtggcgcggaaaaatgccgccatgctaccgaggtgttaggcttcgatgtttgtcttgatcaccacgcggatgattttgccgaacaactggcgaaagcgtgcccaaaaggtattgatatctattatgaaaacgtgggcggtaaggtattcgatgcggtgctaccgttacttaatacatctgcgcgcattcccgtctgcggattagtgagcagctataacgctacagagctaccacccggtccggatcgtttacctctgttgatggctacagtgctgaaaaaacgtattcgcttgcaaggttttattatcgctcaggattatggtcaccgcatccatgagtttcagagggagatggggcaatgggtgaaagaggataaaatccactaccgcgaagaaattactgacggtttagagaatgcgccacagacgtttatcggcctgctgaagggtaaaaacttcggcaaagtggtgatccgcgtggcgggtgatgattaaagtttcaacggcggcgtaagccgccataaaaatccaggcaaaaagcttattttcagctttaattaactaaccacatcattgttctgctgctaataacaacaaaggtgagtggtttatgattattcactttaatacaccaggtgaattccttctgccatgcaggcagggttggacagaaaacacgcgaaggaattaaaatgcctggaacgggaaaaatgaaacatgtcagtttgactctgcaggttgagaacgacctgaaacatcagcttagtattggcgcattaaaacctggcgcacgcctgattactaaaaatctggcggagcaattaggtatgagtattacacctgtgcgtgaagcattattacgtctggtttcggtgaatgcgctttctgtcgcacctgcacaagcatttacagttccggaagtggggaaacgtcaattagacgaaatcaatcggatccgctacgaactggaattaatggcagttgctctggctgttgaaaacctcaccccgcaagaccttgcggaactccaggaattgctcgagaaattacagcaggcgcaagaaaagggcgacatggaacaaatcattaatgtaaacaggctatttcgcttagcgatttatcatcgctcaaatatgcccatcctgtgtgagatgattgagcaactgtgggtcaggatggggcctggtttacattatctctatgaagcgattaatccagcggaattacgggagcatatagaaaactatcatctgttactcgctgcgttaaaagcaaaagacaaagagggatgcagacattgtcttgctgaaattatgcaacaaaatattgctattttataccagcaatacaatcgttaaagtaaatgcccggcaaataccgggcatcaaggtaattactcaaatctccacgcaatattcatgccgacaccataatttcgtccgggcgaaggttcgtaatatcgcccgtttgactcattgacaatgacagaaccaacgtattctttatcgaataaattatcgacacgaccaaataaatccacagttaaattgtggtaattgtatttatacccggtgaataagccgacgagagtataagacggcgcttttgccgtattttcatcatctgccataatatcgcccatataacgcgcttccgtgcctgcataccaaccatcttccggtacataacctatcgacgcaaagcccatattacgggcgatccctggcatccgattaccgttacaatcctgttcattgcaaacattgctgcgataggtcgcatcaagccaggtccaggacgcgtttacgcgaaaatctcctgcgaaacgttgatcccatgccagttcagcgccttgacgacgggtctttccggcatttttgtaagtcgtacgcccaccgctactgctatcgacaacaatttcatcatcagtgtcggtctgaaacaatgcgagactaagcagcccatcaccaatacgcgttttactgccgatctcaattgtatcgttggtggatggttttaaacctaagttcataccgctttgcccatcagcacgataagacagctcattaatcgtcggcgtttcaaaacctcgcccggctgccagatagatattccaggcatcggtcattgcatattttaacgaaccggcaggtagccatttatgataactggcatcaccgctgtcatcgccgttacccggagtaacgtaatggtcgttggaatcaaaccacacggagctgtagcgcacgccagcatccagcgacagtttttcgctcagctgccactgcgtctgtaaatagggatcgatgttccacatcagattgcgttcgtcgcgacgcaactcacctttttgcccgtactccggcatgccgctattcaggcggaagttattgtagcccttgcggttttcactcatgttttcgtagttcaggccggtagtgaacgtgaccggaacgcccagttcaccacggtgtgtccagcggctgtctattccctggtaatggcgttgcagggtaatcacgccgcccgcatgtgacgggttaagttgtggtgccatgggtattgactggtactgggtcgtttctcgctctccggcatacatcatcacactcatatcatcccgcgaactcaggctacgctcatagcgcaacccagcctgagtttgcttgatggtttttcgcgtgtcgtactgttctgcacgaggcgcttgttgtggattagccttccattctgctttggttagcccacctgggtcatctgctttgatatccacactattgaaaatcagacttaatttgctggcttcatcaatgcgtacgcccagtttggcattggctaaatttttctgtgcgccactatggtcacgatagccgtgggtcgtaaaacgcgtggttgagacggtgtaatcgacatcgccaggctgtgtgccgtctcccgttgcgcccgttgctttcagcccatagcgccagctgccaaaactgccgtagtaactactggcttcaatggttggtggctgttgtccggtctgggtggtgacattcattaccccaccagacgcgttgccatacagggcagagaaggggccacgcagcacttccacattttgcacactgcttaaatcgatgttggatgtttgcccttgcccgtcgggcatggtggcgggaataccgtccacatacaggcgaataccgcgaataccgtaagtggagcgggagccaaatccgcgaatcgacagctgtaaatcttgcgcatagttctgccggttttgtacctgcaaaccaggcacgccggtcagtgattcggacaagttaatgcgcggtgttgccaggcgcatctcctcgccatccaccacgcttactgctgctggggtatccagttctgaaaccacctgcggtgcggcactgacaatcatagtctgttcatcagcggcaaaaacaacgggggaaaggacaagcagtgcgggcaaaacggtctgtcggacggaaaaaatcttcatgaaaaaagccaggttaagaatgggaaaacgccgtcatggtaatgaaattgtaaatttatggaaaatgaaacggcacaatacgttaagtaattgagaaaattgtagtcgtaacggcaagaaatgctccacatttgagaaaataatgattaccattcccatttataacaagagcgtaacgatgattacgcttagcgaagcattgtgaagcagcaaaaatatcggttcatcaaagggagtcgtcatgcatttacgtcatctgttttcatcgcgcctgcgtggttcattactgttaggttcattgcttgttgtttcatcattcagtacgcaggccgcagaagaaatgctgcgtaaagcggtaggtaaaggtgcctacgaaatggcttatagccagcaagaaaacgcgctgtggctcgccacttcgcaaagccgcaaactggataaaggtggcgtggtttatcgtcttgatccggtcactctggaagtgacgcaggcgatccataacgatctcaagccgtttggtgccaccatcaataacacgactcagacgttgtggtttggtaacaccgtaaacagcgcggtcacggcgatagatgccaaaacgggcgaagtgaaaggccgtctggtgctggatgatcgtaagcgcacggaagaggtgcgcccgctgcaaccgcgtgagctggtagctgacgatgccacgaacaccgtttacatcagtggtattggtaaagagagcgtgatttgggtcgttgatggcgggaatatcaaactgaaaaccgccatccagaacaccggtaaaatgagtaccggtctggcgctggatagcgaaggcaaacgtctttacaccactaacgctgacggcgaattgattaccatcgacaccgccgacaataaaatcctcagccgtaaaaagctgctggatgacggcaaagagcacttctttatcaacattagccttgataccgccaggcagcgtgcatttatcaccgattctaaagccgcagaagtgttagtggtcgatacccgtaatggcaatattctggcgaaggttgcggcaccggaatcactggctgtgctgtttaaccccgcgcgtaatgaagcctacgtaacgcatcgtcaggcaggtaaagtcagtgtgattgacgcgaaaagctataaagtggtgaaaacgttcgatacgccgactcatccaaacagcctggcgctgtctgccgatggcaaaacgctgtatgtcagtgtgaaacaaaaatccactaaacagcaggaagctacccagccagacgatgtgattcgtattgcgctgtaatagatatggcgagggtgaaaacggtgagacttgcctgccttttatcacggcgtatccggcactttcgtcagtaatctgaatttgcccggcacgtagccgggcaattttgcaattaactcgccgtttcaggcttaaacacaatttcctgtttttcttcatcttcctcgacgactggcgcagtgctgtgaatttcagcaacgcgtttgcgcacaccaaaccagcctataaccagcaaaataccgataatcggcagcgccgcgatagtataagtcccgttcgggtaatcgaacgccatcagcacaaggacactcagtaaaaacagtaatgtcagccaggaagtgaagggcgcgccaggcagtttaaaactgacatccgctgctttgccttctttaatcgctttacgcaggcgcatctggcacacgatgataaacgcccatgaagcgatgattcccagcgacgcgaagttcaacacaatctcaaatacgcgcgacggcaccagatagttgaggaatacgccgacgacatacacaactagtgtcgccagaatcccggcatacggcacatgctgacgactcattttcgccataaaactcggtgcggaaccgcccatcgccattgagcgcagaatacgtccggtgcagtacagacctgaattcaggctggagagggcagcggtcagcaccacaatgttcataatgctgccgatatatggcacacccagtttagagaaaaacgtcacgaacggactttgccccgcctgatacgcgctccacggcaataacataaccagcaacaccacggagccgacgtaaaacaggccaatacgccaaatcacactgttaatggctttaggcaccatggtctgcggatctttacattctccggcagctgtacccaccatttcaatggaggcaaaagcaaacactacgccctgaatcaacaccagcgcaggcagcaaaccgtgggggaagaagccgccattatcggtgattaaatgaaagccagtggtgttgccatccagcggctgaccactaccgaggaacactgtacccacgaccaaaaaggtcacaatggcgagcactttaataagcgcaaaccagaactccatctccgcaaaccatttcacaccgatcatattcatggtgccaacgatggtaagtgcagcgagcgcaaagacccactgcggcacgccgccaaacgcaccccagtaatgcatatacagagcgacggcggtaatatcaacaatccccgtcatcgcccagttgatgaagtacatccagccagcaacataagcggctttctcacccaaaaactcacgggcataagaaacaaaactgccactggaagggcggtgtagcaccagctcacccaatgcacgcagaataaaaaacgaaaacaagccacaaattaaataaaccagtgccagtgcgggccccgccatttgcagtcgggctcctgcacctaaaaacaagccggtgccaatcgcgccgccaatggcgatcatctgcacctggcgattgcccatcgctttgtgatacccctcttcgtgggcattaagccagcggcgtttcgcggcgtgttgatctgaagtgtcggtgtcgtgtttactcattgctctccctgattgctttaatgaaaaagtcatataagttgccatgaacaatgtttattcatcctggcgatgatagttatcaccattattctttatgggtataaaactatcggcgcagcatcctacccgttatcgataaacgatgcaaaacatccccttacaatcctgaaggggattaatacaactgacgaaaaaatgacaaatccttttgctggttaacctgtgtactgtcctacacttaatctttaaaagattgtgaggggcatatgattaaggtgtatggcgtacccggatggggctctacaatcagtgagctgatgctaacactggctgatattccttatcagttcgttgatgtcagtggttttgaccacgagggagcttcacgcgagttattgaaaaccctgaacccgttgtgtcaggttccgacactggcattggaaaatgacgagattatgacggagacagcggcgattgcattgatggttctcgatcgtcgcccggaccttgcgccaccggttgggcgcgccgaacgtcagctgtttcaacggctattggtctggctggttgctaatgtctatccaacattcactttcgccgattaccctgagcgttgggctcctgacgcacctgaacagttaaagaagaatgttattgaatatcgaaaatcgctttatatctggttgaattcgcagctcactgctgaaccttatgcgtttggtgagcaactaacgctggtggactgttatctttgcactatgcgcacatgggggcctgggcatgaatggtttcaggataatgccacgaatatcagtgcgattgctgatgctgtatgtcagttaccgaaattacaagaagtattaaaaaggaatgaaattatttgagtgggataccagaagattatgttatttattattcagtaactttatccacaatgatgggcgtaattaattaaattcatggtatgttttttaatttatatcactctccttttcattcagcgtgtctatttcatttcctctgaaaagaaactaactattcacatcgtgcagatgtttcagttgttatcacaggcattctataatctcaaaatgtttttaatgatggatatgctcggagttggagatgcaattaatattaatacaaataaaaatatccggcaggtatgctaaaaggataaatggcgttctctgtatttattcgcaattatctgtaggacaaatatggagagcttgatgagtcagagctaaaacagcaattgattaataaacatgttgatttattcaagaaaatggatgtattttaaatgttgattcttaatataacctaatcaatagattatcaagtgagagctacacattattggaggggcaggggaaaacaccattttgggaacaatgcatcaggtactcttaccactgaagcaagatcatccggcaccaggtggtggtgcagtgctttggaaatggtcccctcgggggagttgtcattattttctatgctatttgcttattatattcatcaggtgaatttaataaattcctaatttgaaatatccactattaagctagtgtttaacgacgttaagatggcaatgtgcagatcatgttatcagggtggggcggtagcgtatattccttatacaaaccatcattcatttcaatgattgttattgaattatttattgttgtgaataaaaagacattatgaatattggtttgactttgcatatcaggttttttattactcgctgtaatgtacgagcctgtcgtgaataacgtcgagaacccatccgttgcgtttgtgattattttgttgactaaacagacacccgtttctctgaagtaaaatcccagactaaatcatcacataaccatgacatttttctgatattccccggtaacgccagatgtcgactcgcttaaccaccctcagccataccagtgaaggccaccgcgtgtcggtccactacggctatgacgataaaggccgcctgaccggcgaacgccagacggtggagaacccggagacgggggaactgctgtggcaccatgagaccggacatgcgtacaacgaacaggggctggcaaaccgcgtcacgccggacagtctgccgccggtggagtggctgacctacggcagcggctatcttgcgggcatgaagctgggcgggacgccgctgctggagttcacgcgcgaccgcctgcaccgtgagacggtgcgcagcttcggcagcatggcaggcagtaatgccgcatataaactgaccagcacatacacccccgcaggccagttacagagccagcacctgaacagcctggtgtatgaccgtgactacgggtggaatgacaacggcgacctggtgcgcatcagcggcccgcgacagacgcgggaatacggctacagcgccacgggcaggctggagagtgtgcgcaccctcgcaccagacctggacatccgcatcccgtatgccacggacccggcgggcaaccggctgccggacccggagctgcacccggacagtacactcacagtgtggccggataaccgcatcgcggaggatgcgcactatgtctaccgccacgatgaatacggcaggctgacggagaagacggaccgcatcccggcgggtgtgatacggacggacgacgagcggacccaccactaccactacgacagccagcaccgcctggtgttctacacgcggatacagcatggcgagccactggtcgagagccgctacctctacgacccgctgggacggcgaatggcaaaacgggtctggcggcgggagcgtgacctgacggggtggatgtcgctgtcgcgtaaaccggaggtgacgtggtatggctgggacggagacaggctgacgacggtgcagactgacaccacacgtatccagacggtatacgagccgggaagcttcacgccgctcatccgggtcgagacagagaacggcgagcgggaaaaagcgcagcggcgcagcctggcagagacgctccagcaggaagggagtgagaacggccacggcgtggtgttcccggctgaactggtgcggctgctggacaggctggaggaagaaatccgggcagaccgcgtgagcagtgaaagccgggcgtggcttgcgcagtgcgggctgacggtggagcaactggccagacaggtggagccggaatacacaccggcgcgaaaagttcatttttaccactgcgaccaccggggcctgccgctggcgctcatcagcgaagacggcaatacggcgtggcgcggggagtatgatgaatggggcaaccagcttaatgaggagaacccgcatcacctgcaccagccgtaccgtctgccagggcagcagcatgatgaggagtcggggctgtactataaccgtcaccggcactacgatccgttgcaggggcggtatatcaccccggacccgattgggttgagaggtggatggaatatgtatcagtatccgttgaatcccatacaagtgatagacccaatggggttagatgcgattgagaatatgacatcaggtggactaatttatgccgtatctggtgtacctggattgattgctgcaaacagcattactaacagtgcttaccagttcggttatgatatggatgctattgttggcggagctcataatggggccgccgatgcaatgagacattgttacttgatgtgtcgaatgactaagacatttggatcaacaatagctgacgtgataggtaaaaatcatgaggcggcaggggatagacaaggtcagccagctaaagaaagaatcatggatcttaaaaataacactgtcggtattgcttgtggcgatttttctgccaaatgtagcgatgcatgtattgaaaaatataacactgggcaactcttcgggttagatggtataaaagcagataatccaataaaagcaaagcaagggagttcagatgcttcaaattattagaggcaaacttgtcatttttttaattaccctttgtttatttgttgtttaccttgggtttgataacaattcaaattctgacatcgtattttatggacataaaacaccaaagagcgttgagatatatctttctgaaaaaaatattatttataaaataattaatgaccaaaaaattagtagagggaatggtcattttataagtataatggttaataattacaggacgcactgtggagtggttgatataaatcttaattttttcaatgatattctttatagcgtgcgattaaaaaacattagtaaactggagaatatggagttctgcgctacaaaacaacgggtgtattttagtgataaaaacaagaaggctagttataaaataattaattatggagactattatgatgttgattattatgataacaatttgaaaaatgaagtttttgactggattggtaaatggtcataatgaacaacaccagaaagagaaaaatataaaatacatacagaaagacatgagagcaagggacggggcagggcaagatcatgaaaattgtgatgtaaatcacgattttcatctttgctttaacgcctacaggtgatcaaaatttaacctttggaataactaaaaagataaaaaaggacgccaggtgagtattcaaagtttgcttgattatatttcagtgacccctgatatacgacaacaaggaaaggttaaacataaattatctgctattttgtttctcaccgtatgtgcagtaattgcaggtgccgatgagtggcaggaaattgaagattttggacatgaaagacttgaatggctaaagaaatatggtgattttgataatggcattccggtcgatgacaccattgcacgcgttgtgagtaacattgacagtttggcctttgaaaagatgtttattgaatggatgcaggagtgccatgaaatcactgatggtgaaattatagcaatagatggaaagaccataagaggctcctttgataagggaaaaagaaaaggagcaatccatatggtgagtgcattctcgaacgaaaatggtgttgtactggggcaggtgaaaacggaagccaaaagtaatgagattacagccattccagagttgcttaacctactgtatttaaagaaaaatttgataaccattgatgctatgggctgtcagaaagatatcgcttcgaagatcaaagataaaaaagcagattatcttctggcagtaaaaggcaatcaggggaaattacatcatgcattcgaggaaaaatttcctgtaaatgtgttttctaattataaaggcgattcgtttagtacgcaggagataagtcatggaagaaaagaaacacgtttgcatattgtcagtaacgtaacgcctgaacttttgtgattttgaattcgaatggaagggattaaaaaagctttgtgtagcattgtcattcaggcagaagaaagaagataaatcagcagaaggtgtaagcatccgatattatatttcatcaaaggatatggatgctaaagaatttgcacatgctatcagagcgcactggctgatcgagcacagtcttcattgggtgttagatgtaaaaatgaatgaagatgccagccggataagaagaggaaacgcagcctaaataatatctggaataaagaagatggcactgaatttattaagagattgcaaagacattaagggtgaagaggaaaagaaagaaggctgcgttaaacacagggaaagatcatcagaagttcactttttgtactaaacaattcgcattttatgtttaaaaattgagatattccttattacctaaagctgttttttattgcttacacatgatcaaatactccttacataattaaggagaacaaaatggaacttaaaaaattgatgggacatatttctattatccccgattacagacaagcctggaaaatggaacataagttatcggatattctactgttgactatttgtgccgttatttctggtgcagaaggctgggaagatatagaggattttggggaaacacatcccgattttttgaagcaatatggtgattttgaaaatggtattcctgttcacgacaccattgccagagttgtatcctgtatcagtcctgcaaaatttcacgagtgctttattaactggatgcgtgactgccattcttcagatgataaagacgtcattgcaattgatggaaaaacgctccggcattcttatgataagagtcgccgcaggggagcgattcatgtcattagtgcgttctcaacaatgcacagtctggtcatcggacagatcaagacggatgagaaatctaatgagattacagctatcccagaacttcttaacatgctggatattaaaggaaaaatcatcacaactgatgcgatgggttgccagaaagatattgcagagaagatacaaaaacagggaggtgattatttattcgcggtaaaaggaaaccaggggcggctaaataaagcctttgaggaaaaatttccgctgaaagaattaaataatccagcgcatgacagttacgcaatgagtgaaaagagtcacggcagagaagaaatccgtcttcatattgtttgcgatgtccctgatgaacttattgatttcacgtttgaatggaaagggctgaagaaattatgcgtggcagtctcctttcggtccataatagcagaacaaaagaaagagctcgaaatgacggtcagatattatatcagttctgctgatttaaccgcagagaagttcgccacagcaatccgaaaccactggcatgtggagaataagctgcactggcgtctggacgtggtaatgaatgaagacgactgcaaaataagaagaggaaatgcagcagaattattttcagggatacggcacattgctattaatattttgacgaatgataaggtattcaaggcagggttaagacgtaagatgcgaaaagcagccatggacagaaactacctggcgtcagtccttacggggagcgggctttcgtaatcttgccctgggcattattgtcgtataaacgctttaccggacacatgacattcacaatgtgtgttaattttactgacatctttcaaaaggagcgtaatcatgccgcacatcgacattaaatgttttccgcgtgaactggacgaacaacaaaaagcagcacttgctgcagatattaccgacgttattattcgtcatctgaacagtaaagacagttcgataagcattgctctacagcagattcaaccagaatcttggcaagctatctgggatgccgaaatcgcgccccaaatggaggctttgataaagaaacctggttatagcatgaatgcttaacccgccgtaacacgcttgccgctggtaacaaacgtcccagcacctaaatgatgcaacgtattgagcttatcatcatcaaactgccagcggccttcgacaaatacccgtgcgtctgccgctgctgatactacttcgccaaacagcgtgtcgtattcttcttgcgcagaagtcgcaggtagcaatcgacactccatccacgccagacatttttcctcgaccagaggcaaaccaaataccgggcctctcacaaccggaatgccatagcaattaaatttatcttcatcacgccccgacacacttcccaccgcccacgtccagttagttgctgcaacgcccgggataacgatgccaaatttaccgttatgttcaatcaactccctggtccatgtcgatttatctaccacaatcgccacgcgtggaggttcaaactccaccggcattgaccaggctgcagccataatgttacgccgctgggattgctcatcgaaactggtgatcaagaccgttgggccatgatttaacagacggctggcatggtgtaattctatggggatgaatcggctcatggtatcgcctcgcgaagaaggtttttttaagcgtagtccgtaacgcaataagtaacgaaattaacgggattggcgatttgcgaacgtgatgcatgtccgcgatcgcacaaaatagccggtgcggcgtctattccaggttataagttgagaaaaccactaagggaaacgcctgatgacgcccattctgaatcactattttgcccgtattaactggtcgggagctgctgcggtcaatattgatacgcttcgtgcattgcacctgaaacacaattgcaccattccgtttgaaaacctcgacgttttgctgccgagggaaatacagcttgataatcaatcgccggaagagaaactggtgatagcccgtcgtggcggttactgttttgagcagaatggcgtgtttgagcgggtgttacgcgagctggggtttaacgttcgcagcttgttagggcgcgtagtgttatcaaatccgccagcattaccgccgcgcacccatcgtttgctgttggtggaactggaagaggaaaaatggattgctgatgtcggtttcggtgggcagacgctaaccgcgccgattcgtttagtttccgatctcgtgcagaccacgccacacggagagtatcggttgttgcaggagggtgatgattgggtgttgcagtttaatcatcatcagcattggcagtcgatgtaccgttttgatctctgcgagcagcaacaaagcgattatgtgatgggcaatttctggtcggcgcactggccgcagtcgcattttcgccatcatttgctgatgtgccgccatttgccggacggcggcaagctgacactgaccaattttcattttacccattatgaaaatgggcacgcggtggagcagcgaaatctaccggatgtggcgtcattatatgctgtgatgcaagaacagtttggtctgggcgtggatgatgcgaaacatggctttaccgtggatgagttagcgctggtgatggcggcgtttgatacgcacccggaggcgggaaaataatttatgtcaggttgccggatgcggcgtaaacgccttatccggcatacattagcccggttgtagacctgacaggcgaagcgcatcagacaacggtttcagagttcaattgcccattcggcatgaaacaaaatcaccgctgtgcctgaaatggtgactttttccggttggttatcacgaattgtcaccgtcacttcaatcataccgtcacgccccaatgcgcgcccctgatggcctttaacacgcaacacgttgccatcgtggggcaatacgttgtgatgtaccaaccatgcacccatcgggccattggcattgccagtcaccggatcttccacaataccaatcgcaggcgagaacatgcgaccatcggtttcgtttttgcctgggcggatctggaacgggaagaaaccattgcagccaatctttttgctgatagcggtcagcgcattaaggtcaggcgaaagggcgtcgatatccacttccggtttcagtgggatcatcacttttgagtgtcctgttgttgccacctgaattggcaagcctggcagaatatcgtcctcagtgagatgaagcgcgttgataatcgccgcacgtgtttcaccttccagcggtggctcaaagcccggcgtaccttgttccagcgaaatacgataatcatcgttgtgcttttcgatagtcacgcgatgttttcctgccagcgatgtttgccagatcgtgcaatttcctaaacctaacaccttcgcacgtacatagtgcgcagctactgtcgcgtgaccgcaaatcggcacttcaaccgttggcgtaaagtagcggatgcgcacatcgctgtcgtcgctgtgcagcagaaaagcagtttccgaatggcctaactcgcgggcgataagctgcatttgcgcttcgctaagattatcggcggggaaaacaacaccggcagaattgccgcgaaacggttgtgaggtaaaagcatcgacgtggtacacctgcggtttcattaacgttctcctgtgactggagaactatcatagcctgcaagtggccggagagcgaagggctatccggccagggtgaaattatcgccgcgaacgcacaatttgatatcgacgagtaaagtactcaaacggcgcgctccacacatgcaccagtcgggtgaacgggaagagcaggaagatggtcattcccaacaccagatgcaggcggaagacgaacgctacgccgttgagcatctctgacgatccaccacggaaagtgacaatgctttgcgcccaacccaccagcttcatcatttcgctaccatcaggatactgtgctgaaaacggtatggtacttagccccaacagacactggatcagcaaaatgctcatgatgatgatatccggcgtagtggaagtggcacgcacgcgctgatttgtcagcctgcgccacagcagtcctgcgccgccaatcaacgtcaacacaccgcaaataccgccgagcaccatcgccatgagttgtttcgctgccactggcaaaaaccacgcgtacatccagtgcggcgttaacatgccgaacaagtgcccgaagaaaatccccaaaatgccgatatggaacagattcgaccatatcaccatcccgcgtttatcgagcatttgacttgaggaggcgcgccaggtgtactgcccgtagtcgtagcgcagccagctgccgaggaaaaacaccgtcgcacaaatgtacgggtagatatcgtaaaaaaagacgttcagatactgaatcatttcccacctcccgcactgatgtcgacatattgcggcgcgacatcctggctaaagcgtcgctgatattgattaagcggcgagctgtcacacgccgtggcgttatcttcaataaacttcacctgttcctcttcccacactgcatcaagcgcctggcgggtgtcatcgcgctcttcgctgtttacttgttttgtgacactgtcacttgaaagggagcttcccgccagttgcagcagagcatcaaacaacgcgtaccacggtgcctcgcgttgttttaagcgaccgccaagcagggcgaggatcggcgcaacattgagcaatccttctttcgcctgatcgtcaggcagtacgcttaaatactccagatacagcggtagataatcgggcagttcccgacaatccagctgcaggccgaccttttcatactccgccagcaggtccaccattgcctggccgcgatcgcgggactcggcatgaacatgttcgaacagcagcagcgacgtggtgcgcccgcggtcaaacacttcgcaccattcggcctgtttatccagcagcggcgcgttaagcaggttgtgggtgaaatccgtaagcatcggcgcgtcgcggcggatcaacgccagcgcgtcctccttgcattcccacaacagctcgtccggatactccatcaacaggccgatcactttgaggatctgcattattcgccctccgctttgtcgcgcacttcggtgatgttgatggcatcgatacggctactgttgaacaggttgaatttactgtccgaaccgtggcaaccgtcgccaaaggtaaaaccgcagccgttgcgttctgcgaaggcatcgcccgccatttcccgatggctggtcgggataacaaaacgatcttcatagttggcaatggcgagatagcgatacatctcttcgacctgggcgacgctcaggcctacttcgtcgatggcacgagtatcagtaacgccttccacggtttgtgaacgcatatagtggcgcatcgccatcatccgtttcagcgcccgcagtaccggaccggtatcgccggcactcaacatattggcgagatattgcaccggaatacgcaggctttcgatggcgggcagcacgccttcgcttttcggcaaaccgcccgcatctgcgtaggactgaatcggtgacagcggaggaacgtaccagaccatcggcagggtgcggtattcagggtgcaacggtagtgccagtttccagtccatcgccattttgtagactggcgaacgctgggcagcgtcaatcacattttgtggaataccttgtttcagggcttcctcgatcactgagggatcgtgtggatcgaggaacacttcgcactggcgttcatagaggtcaacttcgcgctcggtgctcgccgcttcctcgatgcggtcggcgtcgtaaagcagcacgcccagataccggatgcgacccacgcaggtttctgagcacacggtcggttgaccggactcaattcgtgggtaacagaagatgcatttttctgacttgccgcttttccagttgaagtagatttttttgtacggacaaccgcttatgcacaaacgccagccacggcatttatcctgatcaatcagcacaatgccgtcttcttcgcgtttgtagatagcgccgcttgggcaggtcgccacgcagctgggattgaggcagtgttcgcacaggcgcggcaggtacatcatgaaggtgttttcaaactgcccgtacatctccttttgcatggcctcgaagttgcggtcgcgggcacgtttttcgaactcaccgcccagcagttcttcccagtttggcccccagatcactttgtccatccgtttgccgtcaatcagtgaacgcgggcgagcagtaggaatatgtttgccttccggtgcgctatgcaaatgttcgtagtcgaaggtgaaaggttcgtagtaatcatcaatctgcggcaccaccgggttggcgaagattttggttattacgcccatcttgttgcccagacgcgggcgtatcttgccattcacatcacgcacccagccgccttgccactcttcctgatcttcccagtttttcggataaccaatgcccggtttggtttcgacgttgttaaaccatgcgtactccatgccttcgcgcccggtccagacgtttttacaggtcaccgaacaggtatggcagccgatacatttgtcgaggttaagcaccatgccgacttgtgaacggattttcattttttcgcctcctgtacctgatcgcgaccttcatcatccagccagttaacgttcttcatcttgcggatcatgatgaactcatcgcggttcgatccgacggtgccgtagtagttaaagccccaggccagctgcgcgtaaccgccaatcatatgcgttggtttcgggcaaacgcgggtaaccgagttatgaatgccgccgcgcatgccagttacttccgaaccaggaatattcataatgcgttcctgggcgtgatacatcatggtcatgcccggcggtacacgttggctgaccaccgcgcgggcagtcagcgcgccgttggcgttgaatacttccacccagtcgttatcgacaatggtcagttctcgggcatctgtttcgctgatccagacaatcggtccaccgcgagagagcgtcagcattagcaggttttcactgtaggttgagtgaatgccccatttctggtgcggcgtcaggaagttaagtgctttttccgggaagccgtttggcggtatctggcgcatctcactgacgctacgggtgtcgataggcgggcgataagccaccaggctttcaccaaaagcacgcatccacggatgatcctgatagagctgctggcgtcccgacagcgtgcgccacggaattaactcatgaacgttggtgtatcccgcgttataggagacgtgatcgctttccagaccggaccaggtggggctggagataattttacgcggctgcgcctgaatatcgcgaaagcgaatcttctcgtcctctttgtgcagcgccagatgggtatgttcgcgcccggtgatctcgcccagcgcctgccacgctttgactgcaacatgaccgttggtttccggtgccagtgccagaatcacttctgaagcgtcaatggcggtgtcaatcagcggacgcccctgtgccgggccatcacgcttggtgtaattgagtttgccgaggaaatcgatttcatcctgggtattccacgaaatccctttaccgccattgccaagtttgtccatcaatggcccgagcgaggtaaagcgttcatacgtagcagggtagtcgcgctccaccgccacaatattcggcgcggttttgcctggaatcagatcgcattcgcctttgcgccagtcgagcacttcacacggctgtgagagctctgccggagagtcatgcagtaggggttgtaataccacgtcggtttctttgccaagatgacccacgcacacttgcgaaaatgctttggcgatacctttgtagatttcccagtcgctgcgtgattcccacgccggatcgaccgccgcagaaagcggatgaataaacggatgcatatccgaggtgttcatatcgtctttttcgtaccaggtggcggtgggcagaacgatatcggagaacaggcaggtactggacatgcggaagtcgagcgtcaccagcaggtcgagcttgccttcaatcgctgcagtttgccactcgacttcttccggtttgatcccgtcgctggcaccgagttcctcgccctgaatcccgctttcggtccccagcagatacttctgcatatactcgtggcctttgccggaggagccaagcaggttagagcgccagacaaacaaattacgcggatgattgctgctgctatctggttgttcgcaggccatacgtaaatcgcccgatttcagcgcctgggcggtaaattctgtgggggataatccggccttgtcggcttcagctttaatcccgagcgggttacgccccagctgcggcgcagaaggtagccagcccatacgttcggcgcgaacgttgaaatcaatcagatgaccgctgtacttactggcatcggcgagcggtgaaagtaactcctgagcagagactttttcatagcgccattggctggaatgattgtagaaaaacgaggtgctgttcatttggcgcggtggtcggttccagtcgagcgcaaaggccagtggcaaccagccggtttgtgggcgcagtttttcctggccgacatagtgtgcccagccgccaccgctttgcccgacacaaccgcagaagatcagcatattgatcatcccgcggtagttcatgtccatgtgataccagtggttaacacctgcgccgaggataatcatcgagcgcccatgcgttttatgggcggtatcggcaaattcacgggcgatggtttcaatatactggcgcggcacgccggtaatttgctcaccccaggctggggtgtacggtttgatttcagcgtaatctttcgcactgttttcatcttccagcccgcgatcgaggccgtaattcgccagtaccaaatcataaacgctgaccaccggacaggtgttgccatcgactaacgtcaggtttttaacgggcaattggcgcaccagcaccggattgtgttttacgctgcgaaaatgcggattttcaatgccgccaaagtaggggaaggccacgcctgcaacagcgtcatgttgaccgagcagggttaacgacaattcggtttccgtaccggcggcaatggattccagattccatttgcctttttctccccagcggaaaccaatcgaaccgttcggcactaccaattcacctgcggtattaactgctacggttttccactgcggattgttgctttcgcccagtccatccaccaggtcagatgcgcggatcatgcgcccgggaacgtagctaccatcgtcgcgaggctccagcattaccagcatcggcatgtcgctgtagcggcggcagtagttgataaagtagtcgctgggattatcgagatgaaactcttttaaaatcacatggcccattgccatcgccagggcgctatcagtgccttgtttcggtgccagccactggtcgcacaatttggccacttcagagtagtcaggggtaatggcgatggttttagtgcctttgtagcgtacttcggtaaagaagtgggcgtccggcgtacgtgtctgcggtacgttagacccccaggcgatgatgtagctggagttataccagtcggcagattccggtacgtcggtttgctcgccccaggtcatcggcgaggcgggcggcaggtcgcaataccagtcgtagaaacttaaacaggtgccgccaagcagcgacagataacgcgttccggcggcgtaagaaaccatcgacatcgccgggatcggcgagaaaccggcaacgcgatccgggccgtaggttttgatggtccagacgttagcggcggcaatcagctggtttagttcctgccagttggagcggataaacccgccgcgcccacgcacttgtttgtagctcaggcacttttgcggatcgttcataatcgatgcccacgccagtaccggatcgctgtgttgcttgagggcttcgcgccacagttcaatcagtcgtttacgaatgagcgggtatttcaggcggttagcgctgtaaagataccaggagtaacttgcgccacgcgggcagccgcgaggttcatgattgggcaggtcagggcgagtgcgcgggtagtcggtctgttggatttcccaggtcaccagaccatttttaacgtagattttccagctacaggagcctgtacagttaacaccgtgggtggaacgcacgattttgtcgaactgccaacgctggcgatagctgtcctcccagtcgcggttgctatgcatcacctgtccgtgaccatcggcaaaggtttcgcccttttgtttgaagtagcgaaagcgatccaaaagtttactcatgacatgactcctgctccaggaatgaattgggatctgatgccttgtcggatgcgacacggttgtacatcaggcatcgatctcttatttttggctgaacttccgccgaccataaaccagccaggtcagcagcacacaaacgatgtagaagattaaaaacactttcatcgcgccgaccggagagccggtcatattgagcgacatgccaaacgcctgcggaataaaaaagccgcccactgcgccaatggctgagataaagcccagagccgccgccgtttcggtgacggcttctttatgagcttgctcatcactaccgcctttcatctttacccgataaatggttatctggcgaaagatgacggcgatcatctggaaagtagaaccacttcccagacccgcagtcagaaacagccccataaatacggcgtaaaaggcgatgaaattaccggagcctgtgcccggtaaggtaaggaacagcagggcactgaaaatcgccataaaaataaagttgatcaacgtcacccgcacgccgccgaacttatcggaaatagcaccaccaaccgaccgcgcgatggcaccgataaatgggccaaagaacgccaggcgcagaatattcacatccgggaactgggtttttgccagcatggcaaaacccgcagaaaaaccgataaacgaaccgaaggtggcaaggtaaagcaggctcagcagccagagatgcaggcgttgtaagacagggagctggtcggcaattgaggcgcgtgaactggcgatatcattcatccctgaccatgcggcgatcgtggcaatcgccagtagcggtacccaaatccatgcggcattcgccagcgacatcaccgaaccgtcggcctgcggtacgccattgacgccgagaaaggcaaatacaggtacaaaaatgaccagcggtgcaaccagctgcattacacttacacctaagtttcctaatccgccattaatcccaagagcgctcccttgtttggcttttggaaagaagaaactgatattgcccatgctcgaagcaaagtttgcacctgcaaaaccgcatagcaaagcgataacgataaatatcccaaaaggagtattcggattttgcacggcaattccgagccagacgcaaggaataatcaggattgcagtactaaaaaccgtccatcggcgtccaccgaatataggcaccataaaggagtagggaacacgcaataatgcgccagaaacggagggtaatgcggttaataaaaagagttgatcggtagtaaaattaaaaccgattttattgagattaacggtaactgcgctaaatagcatccagacacagaaggcaagaagtagacaactgactgatatccagagatttcttcgagcaatatgttttcctttattttcccagaaggccggattttctggtttccagtcgcgcaaaagataacgactatttttctcattttgcagtgccatattgttcctcacatgcacacattggtaatgaaaaaaagacaaaacacgaggtaaggcgcaatagccagttattagaattaaggatgaattgggtgaagtgctgattgaaagaatagataagaaagcgtaaccgcgggggcagaatggggattaagtagccagatatgtgttactaaatgtaactaacaagctaaccttcaaacggggttaatctttgaacgtatgtcatgtttcaacccttcagatcgtgaatctaaagggttacatattaactatattatcaacaagaccagacacttatagaattagtgatgatttattcactaaaaaggccatgaactggaggaaaacgatctgtccagaaggtctatcggttcctctcttattgcctgattgtaataatcgttattacagtaagtattgtttatttcatctaaggtcatgtttttaacttttatattcatctggtttacaacttcctctgtcttgtaagtgtgtatattatatggggtatatgcttttttaataggatagtgaaacaattcgttatccacatctattccgtcagagtgaacttcaaatgcaccaggcgaaagaattgccaggccagtattaagcttaagtgctggggaaaacaaattaaataacatgagctgcatagtagggcaattgttcttcccagaaacatttaaaaaatttaagttttgctctgttttattatggggaataaagttccaatatcggatgtattattagtatcaatgtgggttattttattattgtccagtcttaaacttttgatagatggaagataagtcaggaaatcaagatttatatatttcaactggttgttagcagcgtttaatgtctgaacattgcagaagttgctatagaatattttaatttcagaaagcaaattgttgttaataagtaacgtattcaagttgggaaataagtcattgtgtaaacttgttagtttattatgggatagatccagcagtaagagttcatttttattacctgcaacaatatcagttaattgattatggctgagattcaggtattgcagccattcgcaagattctaattgcacaaactctagttgattatgtgccgcactaaaataagtaactgatgaaagcctatctatatcaatatttctgagagcattattattcatagatatatgtgtaatacttacatttctgccttgaggaaaatttattgactcaagagcattactattcagacttagctttacgagtctatcgtagttggttgcatcaaaatgtgtgaattggttattatcaagattgatagatgtgaagttttgcagccctggtggttgagtggttaaattaagtcctgataaatcaatggtcacttcattagtgtcatcaattatatttcttactgcagtccagtactgcatttgtgcaagtggatcattgttgatgccgttaactaatacatgccaaagatgttttgatgatattagttgatcaatgtcattggttggcagtaaattgttattgcttaagtttaaatattccagttttgtagtgtttttggcgtttaaatgtgcaatatggttgtcgtttaaagtgattgttttcatcctgggatgattgtgtaatataaggtcagtgatcatattgtgatgggcacttaactcaatcagagattcttgccgcgcgagccgttggcttcatcgttatagcctttaaaatcatattcccagtgaccaaaaccaatcatttgatcattgatttgcgtttctcctttaaagccgagacgggcataagttttatcaccatcgtcacgcttatcatcagtaaaataacgtagagcggtaaccttgccataaaggtcgagtttattaccatccttgttatagacttcggcagcgtgtgctacgttcgcagctaacaaaccagttacaaccaccgcaactatttttaatttcatttaacagaatccttttaattatcgttaaacgtattttctaaacgaattttaaacggcgtcatttataaatgacatactgtttttaaaatagaatggtgattaaaaacaatgagaaaaatagatgaaataatattatttatcgatatgtgatcgaagtcgaaatgagatataaggtgaattactggtatttgaaatttatttttttaatattgtcggaatttatctgattaactaccgggccgtagacccggcagttattttaaccacgacgtgtcgccagccagcagagcagggaaccgccgcagaccatcagcgcgccttgccagaacgagaacgacagcggggcgctgagcagcacggctgcaagcgctgaggaaagtacaggcgtaaaatacgaacctaccgccataatggtgacattgccatgcaatataccgacattccatgcagcataagcaaatcctaaggtaaatgccgcagagatgagtttaatcatgacgggcgtgctaaatatcatttctggttgtggcgtaagaaaatagtaaacccacagacttgctcccgttagcaggacaaaaacggtaattccattaaatccgcgtgcgtatttattcgttactgtgcaataggctgcccagataaacgcaccaatgaacgccaggaaataactcaatgggctggtggtgatattattgatgatttcatcataatgtaacccattgtcaccgcctaacacccaacagacgccgacgagggctaataataatccaggtacaatcaaccagttggttttctgaccattaaacagaatggcaaagagaattgtcaggctgggccacagatagttcaccatacccacttcaatcgcctgatgatgggtcgccgcataccctaaggaaagcgccagacagatttcatagctgacgaataacagactcccggcgagtaaatagcctttcgggatttgccgaatacgcggaaatccaaccgtgaagattaacagcagcccgcttaatgaatagatagcagctgcgcc

(The sequence listing continues in the following parts.)
